(19) United States
(12) Patent Application Publication
(10) Pub. No.: US 2023/0235092 A1
(43) Pub. Date: Jul. 27, 2023

(54) ANTIGEN BINDING POLYPEPTIDES, ANTIGEN BINDING POLYPEPTIDE COMPLEXES AND METHODS OF USE THEREOF

(71) Applicant: ModeX Therapeutics, Natick, MA (US)

(72) Inventors: Ronnie Rong WEI, Weston, MA (US); Ling XU, Newton Center, MA (US); Zhi-Yong YANG, Newton Center, MA (US); Edward SEUNG, Medford, MA (US); Gary J. NABEL, Delray Beach, FL (US); Lan WU, Chestnut Hill, MA (US); Mark GRECI, Natick, MA (US); Hao CHEN, Acton, MA (US)

(21) Appl. No.: 17/936,044

(22) Filed: Sep. 28, 2022

Related U.S. Application Data
(60) Provisional application No. 63/292,382, filed on Dec. 21, 2021.
(60) Provisional application No. 63/291,305, filed on Dec. 17, 2021.
(60) Provisional application No. 63/249,833, filed on Sep. 29, 2021.
(60) Provisional application No. 63/249,794, filed on Sep. 29, 2021.
(60) Provisional application No. 63/249,919, filed on Sep. 29, 2021.
(60) Provisional application No. 63/249,722, filed on Sep. 29, 2021.

(51) Int. Cl. C07K 19/00; C07K 16/10; C07K 16/08; C07K 16/12

(52) U.S. Cl. CPC C07K 19/00; C07K 16/1018; C07K 16/1027; C07K 16/087; C07K 16/082; C07K 16/1081; C07K 16/1275; C07K 16/125; C07K 16/1285; C07K 16/1253; C07K 16/1009; C07K 2319/41; C07K 2319/43; C07K 2319/42; C07K 2317/21; C07K 2317/24

(57) ABSTRACT

Disclosed are antigen binding polypeptides and antigen binding polypeptide complexes (e.g., antibodies and antigen binding fragments thereof) having certain structural features. Also disclosed are polynucleotides and vectors encoding such polypeptides and polypeptide complexes; chimeric antigen receptors (CARs), cells, pharmaceutical compositions and kits containing such polypeptides and polypeptide complexes; and methods of using such polypeptides and polypeptide complexes.

### CROSS REFERENCE TO RELATED APPLICATIONS

[0001] This application claims the priority benefit of U.S. Provisional Application No. 63/249,722, filed Sep. 29, 2021; U.S. Provisional Application No. 63/249,794, filed Sep. 29, 2021; U.S. Provisional Application No. 63/249,833, filed Sep. 29, 2021; U.S. Provisional Application No. 63/249,919, filed Sep. 29, 2021; U.S. Provisional Application No. 63/291,305, filed Dec. 17, 2021; and U.S. Provisional Application No. 63/292,382, filed Dec. 21, 2021, which are all incorporated herein by reference in their entireties.

### REFERENCE TO SEQUENCE LISTING SUBMITTED ELECTRONICALLY

[0002] The content of the electronically submitted sequence listing (Name: 4850_0040001_Seglisting_ST26; Size: 1,190,740 bytes; and Date of Creation: Sep. 26, 2022) is herein incorporated by reference in its entirety.

### FIELD

[0003] The present disclosure relates to antigen binding polypeptides and antigen binding polypeptide complexes (e.g., antibodies and antigen binding fragments thereof) having certain structural features. The present disclosure also relates to polynucleotides and vectors encoding such polypeptides and polypeptide complexes, cells, chimeric antigen receptors (CARs), pharmaceutical compositions and kits containing such polypeptides and polypeptide complexes; and methods of using such polypeptides and polypeptide complexes.

### BACKGROUND

[0004] Immunotherapy is the treatment of disease by activating or suppressing the immune system. In recent years, immunotherapy has become of great interest to researchers and clinicians, particularly in its promise to treat cancer and infectious disease. Therapeutic antibodies are an important type of immunotherapy. Therapeutic antibodies can be monospecific, meaning that they have specificity to one antigen or epitope. Therapeutic antibodies have also been engineered to have specificity for two different antigens or epitopes (i.e., bispecific antibodies) or for multiple different antigens or epitopes (trispecific antibodies, tetraspecific antibodies, etc.). In addition, monospecific, bispecific and multispecific antibodies have been combined to form multi-targeting strategies to treat complex human diseases, such as cancer and infectious disease.

[0005] However, the development of therapeutic antibodies can be challenging, especially manufacturing and late stage development. For example, the production of bispecific or multispecific antibodies often requires multiple genes or plasmids for cell line development. These multiple genes or plasmids must be delivered into the same cell to make the correct molecules. Furthermore, bispecific and multispecific antibodies can have mispairing between the heavy and light chains, which can reduce product yield, increase cell line colony screen workload, and create product heterogeneity.

[0006] There is a need for multispecific and multifunctional antigen binding polypeptides and antigen binding polypeptide complexes that can bind to specific combinations of target molecules for selectivity or breadth/neutralization, bring together two or more cell types, bring together targets and deliver activation signals, modify the disease microenvironment, and enhance avidity of binding for improved potency. The present invention meets this unmet need.

[0007] In addition, human immunodeficiency virus (HIV) poses a major infectious disease burden with immense medical and economic impact around the world. Globally, ˜38 million people have been infected with HIV, and more than 30 million individuals have succumbed to acquired immunodeficiency syndrome (AIDS), a chronic condition of weakened immune system caused by HIV infection. “Global Health Sector Strategy On HIV-2016-2021—Towards Ending AIDS,” World Health Organization, June 2016. There are two major forms of HIV: HIV-1 and HIV-2. HIV-1 is the more prevalent form worldwide, while HIV-2 is less pathogenic and mostly confined to West Africa.

[0008] The major structural proteins of HIV are Gag, Pol and Env. Gag (group specific antigen) is the structural protein for the viral core. Pol is a polyprotein containing the enzymes critical for viral replication: protease (PR), reverse transcriptase (RT), and integrase (IN). Env (envelope) encodes glycoproteins that form the virus's exterior envelope. Env is synthesized as a precursor glycoprotein, gp160, which is then processed into gp120 and gp41. Env interacts with the primary receptor CD4 and a coreceptor (such as chemokine receptor CCR5) to fuse viral and target-cell membranes.

[0009] The genetic heterogeneity and glycan shielding of Env have resisted the development of natural immunity to HIV and posed challenges to traditional vaccine development. It has also prompted a search for alternative approaches to HIV prevention, one of the highest priorities in global health.

[0010] Despite a significant collection of anti-HIV/AIDS drugs available, HIV patients still face daily challenges in taking multiple medicines with strict regimens. Inevitably, most patients will bear the consequences of emergence of drug-resistant viral variants, and develop other health issues from the toxicities of taking anti-HIV medicines long term, such as cardiovascular disease, kidney disease, diabetes, bone disease, liver disease, cognitive disorders, etc. Alternative treatment options are urgently needed for HIV/AIDS patients.

[0011] Broadly neutralizing HIV-1 antibodies (bnAbs) are antibodies that neutralize multiple HIV-1 viral strains. bnAbs target conserved epitopes of the virus, meaning that the targeted epitopes may be more likely to remain even if the virus mutates. As such, bnAbs have been investigated recently for HIV/AIDS treatment and prevention. Human clinical studies have revealed two factors critical for efficacy of bnAbs. First, there is the need to exceed a minimally effective dose, or trough level of circulating bnAbs to prevent infection. Second, there is a need to prevent the emergence of viral escape through resistance mutations.

[0012] Early human clinical studies using bnAbs demonstrated the feasibility and safety of this approach with transient reductions of viral load and acceptable tolerability and immunogenicity. Burton et al., Annu. Rev. Immunol. 34:635-659 (2016); Mascola et al., Immunol. Rev. 254:225-244 (2013); Wu et al., Science. 329:856-861 (2010). However, resistant HIV strains emerged rapidly following treatment with individual bnAbs in vitro and in vivo. More recently, a phase II clinical trial with the VRC01 bnAb highlighted the importance of maintaining adequate circulating antibody levels to reduce acquisition rates, suggesting that combination antibody therapy which enhances potency and minimizes escape mutations will be required for effective prevention. Corey et al., N. Engl. J. Med. 384:1003-1014 (2021).

[0013] Multispecific antibodies address the limitations of bnAbs by providing a single antibody type that recognizes multiple independent binding sites on HIV-1 envelope protein. Xu et al., Science. 358(6359):85-90 (2017). Treatment with multispecific antibodies also ensures that independent binding specificities are maintained with the same pharmacokinetics, while treatment with multiple single-target antibodies results in different antibody half-lives that wane at different rates. Furthermore, multispecific antibodies simplify manufacturing and regulatory processes by using one product for clinical development instead of a combination of multiple products.

[0014] Accordingly, multispecific anti-HIV antibodies provide an important technological platform for developing neutralizing antibody-based therapeutics for treating HIV/AIDS, offering a class of medicines with low long-term toxicities and significantly less frequent treatment regimens. Multispecific antibodies also use completely different targets on HIV from the current standard of care in HIV/AIDS medicine, complementing the existing medicines by providing patients alternatives for their disease control and health management. Multispecific antibodies may also offer a meaningful way for HIV prevention in the current absence of an effective HIV vaccine.

[0015] In addition, the development of therapeutic antibodies can be challenging, especially in manufacturing and late stage development. For example, the production of multispecific antibodies often requires multiple genes or plasmids for cell line development. These multiple genes or plasmids must be delivered into the same cell to make the correct molecules. Furthermore, multispecific antibodies can have mispairing between the heavy and light chains, which can reduce product yield, increase cell line colony screen workload, and create product heterogeneity.

[0016] As such, there is a need for multispecific and multifunctional antibodies, antigen binding polypeptides and antigen binding polypeptide complexes that can bind to HIV proteins for selectivity or breadth/neutralization, bring together two or more cell types, bring together targets and deliver activation signals, modify the HIV microenvironment, and enhance avidity of binding for improved potency. The present invention meets this unmet need.

### BRIEF SUMMARY

[0017] Provided herein is an antigen binding polypeptide complex comprising a first polypeptide and a second polypeptide; wherein the first polypeptide has a structure represented by VL1-VL2-VH2-VH1; VH1-VH2-VL2-VL1; VL1-L1-VL2-L2-VH2-L3-VH1; or VH1-L1-VH2-L2-VL2-L3-VL1; wherein the second polypeptide has a structure represented by VL3-VH3; VH3-VL3; VL3-L4-VH3; or VH3-L4-VL3; wherein VL1 is a first immunoglobulin light chain variable region; VL2 is a second immunoglobulin light chain variable region; VL3 is a third immunoglobulin light chain variable region; VH1 is a first immunoglobulin heavy chain variable region; VH2 is a second immunoglobulin heavy chain variable region; VH3 is a third immunoglobulin heavy chain variable region; and L1, L2, L3 and L4 are amino acid linkers.

[0018] Provided herein is an antigen binding polypeptide complex comprising a first polypeptide and a second polypeptide; wherein the first polypeptide has a structure represented by VL1-VL2-VH2-VH1-Fc; VH1-VH2-VL2-VL1-Fe; VL1-L1-VL2-L2-VH2-L3-VH1-Fc; VH1-L1-VH2-L2-VL2-L3-VL1-Fc; VL1-L1-VL2-L2-VH2-L3-VH1-L4-Fc; or VH1-L1-VH2-L2-VL2-L3-VL1-L4-Fc; wherein the second polypeptide has a structure represented by VL3-VH3-Fc; VH3-VL3-Fc; VL3-L5-VH3-Fc; or VH3-L5-VL3-Fc; wherein VL1 is a first immunoglobulin light chain variable region; VL2 is a second immunoglobulin light chain variable region; VL3 is a third immunoglobulin light chain variable region; VH1 is a first immunoglobulin heavy chain variable region; VH2 is a second immunoglobulin heavy chain variable region; VH3 is a third immunoglobulin heavy chain variable region; Fc is a region comprising an immunoglobulin heavy chain constant region 2 (CH2), an immunoglobulin heavy chain constant region 3 (CH3), and optionally, an immunoglobulin hinge; and L1, L2, L3, L4 and L5 are amino acid linkers.

[0019] Provided herein is an antigen binding polypeptide complex comprising a first polypeptide and a second polypeptide; wherein the first polypeptide has a structure represented by VL1-VL2-VH2-VH1-CH1; VH1-VH2-VL2-VL1-CH1; VL1-VL2-VH2-VH1-CL; VH1-VH2-VL2-VL1-CL; VL1-VL2-VH2-VH1-CH1-CL; VH1-VH2-VL2-VL1-CH1-CL; VL1-VL2-VH2-VH1-CL-CH1; VH1-VH2-VL2-VL1-CL-CH1; VL1-L1-VL2-L2-VH2-L3-VH1-L4-CH1; VH1-L1-VH2-L2-VL2-L3-VL1-L4-CH1; VL1-L1-VL2-L2-VH2-L3-VH1-L4-CL; VH1-L1-VH2-L2-VL2-L3-VL1-L4-CL; VL1-L1-VL2-L2-VH2-L3-VH1-L4-CH1-L5-CL; VH1-L1-VH2-L2-VL2-L3-VL1-L4-CH1-L5-CL; VL1-L1-VL2-L2-VH2-L3-VH1-L4-CL-L5-CH1; or VH1-L1-VH2-L2-VL2-L3-VL1-L4-CL-L5-CH1; wherein the second polypeptide has a structure represented by VL3-VH3-CH1; VH3-VL3-CH1; VL3-VH3-CL; VH3-VL3-CL; VL3-VH3-CH1-CL; VH3-VL3-CH1-CL; VL3-VH3-CL-CH1; VH3-VL3-CL-CH1; VL3-CL-VH3-CH1; VL3-CH1-VH3-CL; VH3-CH1-VL3-CL; VH3-CL-VL3-CH1; VL3-L6-VH3-L7-CH1; VH3-L6-VL3-L7-CH1; VL3-L6-VH3-L7-CL; VH3-L6-VL3-L7-CL; VL3-L6-VH3-L7-CH1-L8-CL; VH3-L6-VL3-L7-CH1-L8-CL; VL3-L6-VH3-L7-CL-L8-CH1; VH3-L6-VL3-L7-CL-L8-CH1; VL3-L6-CL-L7-VH3-L8-CH1; VL3-L6-CH1-L7-VH3-L8-CL; VH3-L6-CH1-L7-VL3-L8-CL; VH3-L6-CL-L7-VL3-L8-CH1; VL3-VH3-L6-CH1-CL; VH3-VL3-L6-CH1-CL; VL3-VH3-L6-CL-CH1; VH3-VL3-L6-CL-CH1; VL3-CL-L6-VH3-CH1; VL3-CH1-L6-VH3-CL; VH3-CH1-L6-VL3-CL; or VH3-CL-L6-VL3-CH1; wherein VL1 is a first immunoglobulin light chain variable region; VL2 is a second immunoglobulin light chain variable region; VL3 is a third immunoglobulin light chain variable region; VH1 is a first immunoglobulin heavy chain variable region; VH2 is a second immunoglobulin heavy chain variable region; VH3 is a third immunoglobulin heavy chain variable region; CH1 is an immunoglobulin heavy chain constant region 1; CL is an immunoglobulin light chain constant region; and L1, L2, L3, L4, L5, L6, L7 and L8 are amino acid linkers.

[0020] Provided herein is an antigen binding polypeptide complex comprising a first polypeptide and a second polypeptide; wherein the first polypeptide has a structure represented by VL1-VL2-VH2-VH1-CH1-Fc; VH1-VH2-VL2-VL1-CH1-Fc; VL1-VL2-VH2-VH1-CL-Fc; VH1-VH2-VL2-VL1-CL-Fc; VL1-VL2-VH2-VH1-CH1-CL-Fc; VH1-VH2-VL2-VL1-CH1-CL-Fc; VL1-VL2-VH2-VH1-CL-CH1-Fc; VH1-VH2-VL2-VL1-CL-CH1-Fc; VL1-L1-VL2-L2-VH2-L3-VH1-L4-CH1-Fc; VH1-L1-VH2-L2-VL2-L3-VL1-L4-CH1-Fc; VL1-L1-VL2-L2-VH2-L3-VH1-L4-CL-Fc; VH1-L1-VH2-L2-VL2-L3-VL1-L4-CL-Fc; VL1-L1-VL2-L2-VH2-L3-VH1-L4-CH1-L5-CL-Fc; VH1-L1-VH2-L2-VL2-L3-VL1-L4-CH1-L5-CL-Fc; VL1-L1-VL2-L2-VH2-L3-VH1-L4-CL-L5-CH1-Fc; or VH1-L1-VH2-L2-VL2-L3-VL1-L4-CL-L5-CH1-Fc; wherein the second polypeptide has a structure represented by VL3-VH3-CH1-Fc; VH3-VL3-CH1-Fc; VL3-VH3-CL-Fc; VH3-VL3-CL-Fc; VL3-VH3-CH1-CL-Fc; VH3-VL3-CH1-CL-Fc; VL3-VH3-CL-CH1-Fc; VH3-VL3-CL-CH1-Fc; VL3-CL-VH3-CH1-Fc; VL3-CH1-VH3-CL-Fc; VH3-CH1-VL3-CL-Fc; VH3-CL-VL3-CH1-Fe; VL3-L6-VH3-L7-CH1-Fc; VH3-L6-VL3-L7-CH1-Fc; VL3-L6-VH3-L7-CL-Fc; VH3-L6-VL3-L7-CL-Fc; VL3-L6-VH3-L7-CH1-L8-CL-Fc; VH3-L6-VL3-L7-CH1-L8-CL-Fc; VL3-L6-VH3-L7-CL-L8-CH1-Fc; VH3-L6-VL3-L7-CL-L8-CH1-Fc; VL3-L6-CL-L7-VH3-L8-CH1-Fc; VL3-L6-CH1-L7-VH3-L8-CL-Fc; VH3-L6-CH1-L7-VL3-L8-CL-Fc; VH3-L6-CL-L7-VL3-L8-CH1-Fc; VL3-VH3-L6-CH1-CL-Fc; VH3-VL3-L6-CH1-CL-Fc; VL3-VH3-L6-CL-CH1-Fc; VH3-VL3-L6-CL-CH1-Fc; VL3-CL-L6-VH3-CH1-Fc; VL3-CH1-L6-VH3-CL-Fc; VH3-CH1-L6-VL3-CL-Fc; or VH3-CL-L6-VL3-CH1-Fc; wherein VL1 is a first immunoglobulin light chain variable region; VL2 is a second immunoglobulin light chain variable region; VL3 is a third immunoglobulin light chain variable region; VH1 is a first immunoglobulin heavy chain variable region; VH2 is a second immunoglobulin heavy chain variable region; VH3 is a third immunoglobulin heavy chain variable region; Fc is a region comprising an immunoglobulin heavy chain constant region 2 (CH2), an immunoglobulin heavy chain constant region 3 (CH3), and optionally, an immunoglobulin hinge; CH1 is an immunoglobulin heavy chain constant region 1; CL is an immunoglobulin light chain constant region; and L1, L2, L3, L4, L5, L6, L7 and L8 are amino acid linkers.

[0021] Provided herein is an antigen binding polypeptide complex comprising a first polypeptide and a second polypeptide; wherein the first polypeptide has a structure represented by VL1-VL2-VH2-VH1; VH1-VH2-VL2-VL1; VL1-L1-VL2-L2-VH2-L3-VH1; VH1-L1-VH2-L2-VL2-L3-VL1; VL1-VL2-VH2-VH1-Fc; VH1-VH2-VL2-VL1-Fc; VL1-L1-VL2-L2-VH2-L3-VH1-Fc; VH1-L1-VH2-L2-VL2-L3-VL1-Fc; VL1-L1-VL2-L2-VH2-L3-VH1-L4-Fc; VH1-L1-VH2-L2-VL2-L3-VL1-L4-Fc; VL1-VL2-VH2-VH1-CH1; VH1-VH2-VL2-VL1-CH1; VL1-VL2-VH2-VH1-CL; VH1-VH2-VL2-VL1-CL; VL1-VL2-VH2-VH1-CH1-CL; VH1-VH2-VL2-VL1-CH1-CL; VL1-VL2-VH2-VH1-CL-CH1; VH1-VH2-VL2-VL1-CL-CH1; VL1-L1-VL2-L2-VH2-L3-VH1-L4-CH1; VH1-L1-VH2-L2-VL2-L3-VL1-L4-CH1; VL1-L1-VL2-L2-VH2-L3-VH1-L4-CL; VH1-L1-VH2-L2-VL2-L3-VL1-L4-CL; VL1-L1-VL2-L2-VH2-L3-VH1-L4-CH1-L5-CL; VH1-L1-VH2-L2-VL2-L3-VL1-L4-CH1-L5-CL; VL1-L1-VL2-L2-VH2-L3-VH1-L4-CL-L5-CH1; VH1-L1-VH2-L2-VL2-L3-VL1-L4-CL-L5-CH1; VL1-VL2-VH2-VH1-CH1-Fc; VH1-VH2-VL2-VL1-CH1-Fc; VL1-VL2-VH2-VH1-CL-Fc; VH1-VH2-VL2-VL1-CL-Fc; VL1-VL2-VH2-VH1-CH1-CL-Fc; VH1-VH2-VL2-VL1-CH1-CL-Fc; VL1-VL2-VH2-VH1-CL-CH1-Fc; VH1-VH2-VL2-VL1-CL-CH1-Fc; VL1-L1-VL2-L2-VH2-L3-VH1-L4-CH1-Fe; VH1-L1-VH2-L2-VL2-L3-VL1-L4-CH1-Fc; VL1-L1-VL2-L2-VH2-L3-VH1-L4-CL-Fc; VH1-L1-VH2-L2-VL2-L3-VL1-L4-CL-Fc; VL1-L1-VL2-L2-VH2-L3-VH1-L4-CH1-L5-CL-Fc; VH1-L1-VH2-L2-VL2-L3-VL1-L4-CH1-L5-CL-Fc; VL1-L1-VL2-L2-VH2-L3-VH1-L4-CL-L5-CH1-Fc; or VH1-L1-VH2-L2-VL2-L3-VL1-L4-CL-L5-CH1-Fc; wherein the second polypeptide has a structure represented by VL3-VH3; VH3-VL3; VL3-L4-VH3; VH3-L4-VL3; VL3-VH3-Fc; VH3-VL3-Fc; VL3-L4-VH3-Fc; VH3-L4-VL3-Fc; VL3-VH3-CH1; VH3-VL3-CH1; VL3-VH3-CL; VH3-VL3-CL; VL3-VH3-CH1-CL; VH3-VL3-CH1-CL; VL3-VH3-CL-CH1; VH3-VL3-CL-CH1; VL3-CL-VH3-CH1; VL3-CH1-VH3-CL; VH3-CH1-VL3-CL; VH3-CL-VL3-CH1; VL3-L6-VH3-L7-CH1; VH3-L6-VL3-L7-CH1; VL3-L6-VH3-L7-CL; VH3-L6-VL3-L7-CL; VL3-L6-VH3-L7-CH1-L8-CL; VH3-L6-VL3-L7-CH1-L8-CL; VL3-L6-VH3-L7-CL-L8-CH1; VH3-L6-VL3-L7-CL-L8-CH1; VL3-L6-CL-L7-VH3-L8-CH1; VL3-L6-CH1-L7-VH3-L8-CL; VH3-L6-CH1-L7-VL3-L8-CL; VH3-L6-CL-L7-VL3-L8-CH1; VL3-VH3-L6-CH1-CL; VH3-VL3-L6-CH1-CL; VL3-VH3-L6-CL-CH1; VH3-VL3-L6-CL-CH1; VL3-CL-L6-VH3-CH1; VL3-CH1-L6-VH3-CL; VH3-CH1-L6-VL3-CL; VH3-CL-L6-VL3-CH1; VL3-VH3-CH1-Fc; VH3-VL3-CH1-Fc; VL3-VH3-CL-Fc; VH3-VL3-CL-Fc; VL3-VH3-CH1-CL-Fc; VH3-VL3-CH1-CL-Fc; VL3-VH3-CL-CH1-Fc; VH3-VL3-CL-CH1-Fc; VL3-CL-VH3-CH1-Fc; VL3-CH1-VH3-CL-Fe; VH3-CH1-VL3-CL-Fc; VH3-CL-VL3-CH1-Fc; VL3-L6-VH3-L7-CH1-Fc; VH3-L6-VL3-L7-CH1-Fc; VL3-L6-VH3-L7-CL-Fc; VH3-L6-VL3-L7-CL-Fc; VL3-L6-VH3-L7-CH1-L8-CL-Fc; VH3-L6-VL3-L7-CH1-L8-CL-Fc; VL3-L6-VH3-L7-CL-L8-CH1-Fc; VH3-L6-VL3-L7-CL-L8-CH1-Fc; VL3-L6-CL-L7-VH3-L8-CH1-Fc; VL3-L6-CH1-L7-VH3-L8-CL-Fc; VH3-L6-CH1-L7-VL3-L8-CL-Fc; VH3-L6-CL-L7-VL3-L8-CH1-Fc; VL3-VH3-L6-CH1-CL-Fc; VH3-VL3-L6-CH1-CL-Fc; VL3-VH3-L6-CL-CH1-Fc; VH3-VL3-L6-CL-CH1-Fc; VL3-CL-L6-VH3-CH1-Fc; VL3-CH1-L6-VH3-CL-Fc; VH3-CH1-L6-VL3-CL-Fc; or VH3-CL-L6-VL3-CH1-Fc; wherein VL1 is a first immunoglobulin light chain variable region; VL2 is a second immunoglobulin light chain variable region; VL3 is a third immunoglobulin light chain variable region; VH1 is a first immunoglobulin heavy chain variable region; VH2 is a second immunoglobulin heavy chain variable region; VH3 is a third immunoglobulin heavy chain variable region; Fc is a region comprising an immunoglobulin heavy chain constant region 2 (CH2), an immunoglobulin heavy chain constant region 3 (CH3), and optionally, an immunoglobulin hinge; CH1 is an immunoglobulin heavy chain constant region 1; CL is an immunoglobulin light chain constant region; and L1, L2, L3, L4, L5, L6, L7 and L8 are amino acid linkers.

[0022] Provided herein is an antigen binding polypeptide complex comprising a first polypeptide, a second polypeptide, and a third polypeptide; wherein the first polypeptide has a structure represented by VL1-VL2-VH2-VH1; VH1-VH2-VL2-VL1; VL1-L1-VL2-L2-VH2-L3-VH1; or VH1-L1-VH2-L2-VL2-L3-VL1; wherein the second polypeptide has a structure represented by VL3; wherein the third polypeptide has a structure represented by VH3; wherein VL1 is a first immunoglobulin light chain variable region; VL2 is a second immunoglobulin light chain variable region; VL3 is a third immunoglobulin light chain variable region; VH1 is a first immunoglobulin heavy chain variable region; VH2 is a second immunoglobulin heavy chain variable region; VH3 is a third immunoglobulin heavy chain variable region; and L1, L2 and L3 are amino acid linkers.

[0023] Provided herein is an antigen binding polypeptide complex comprising a first polypeptide, a second polypeptide, and a third polypeptide; wherein the first polypeptide has a structure represented by VL1-VL2-VH2-VH1-Fe; VH1-VH2-VL2-VL1-Fc; VL1-L1-VL2-L2-VH2-L3-VH1-Fc; VH1-L1-VH2-L2-VL2-L3-VL1-Fc; VL1-L1-VL2-L2-VH2-L3-VH1-L4-Fc; or VH1-L1-VH2-L2-VL2-L3-VL1-L4-Fc; wherein the second polypeptide has a structure represented by VL3 or VL3-L1; wherein the third polypeptide has a structure represented by VH3-Fc or VH3-L1-Fc; wherein VL1 is a first immunoglobulin light chain variable region; VL2 is a second immunoglobulin light chain variable region; VL3 is a third immunoglobulin light chain variable region; VH1 is a first immunoglobulin heavy chain variable region; VH2 is a second immunoglobulin heavy chain variable region; VH3 is a third immunoglobulin heavy chain variable region; Fc is a region comprising an immunoglobulin heavy chain constant region 2 (CH2), an immunoglobulin heavy chain constant region 3 (CH3), and optionally, an immunoglobulin hinge; and L1, L2, L3 and L4 are amino acid linkers.

[0024] Provided herein is an antigen binding polypeptide complex comprising a first polypeptide, a second polypeptide, and a third polypeptide; wherein the first polypeptide has a structure represented by VL1-VL2-VH2-VH1-Fc; VH1-VH2-VL2-VL1-Fc; VL1-L1-VL2-L2-VH2-L3-VH1-Fc; VH1-L1-VH2-L2-VL2-L3-VL1-Fc; VL1-L1-VL2-L2-VH2-L3-VH1-L4-Fc; or VH1-L1-VH2-L2-VL2-L3-VL1-L4-Fc; wherein the second polypeptide has a structure represented by VL3-Fc or VL3-L1-Fc; wherein the third polypeptide has a structure represented by VH3 or VH3-L1; wherein VL1 is a first immunoglobulin light chain variable region; VL2 is a second immunoglobulin light chain variable region; VL3 is a third immunoglobulin light chain variable region; VH1 is a first immunoglobulin heavy chain variable region; VH2 is a second immunoglobulin heavy chain variable region; VH3 is a third immunoglobulin heavy chain variable region; Fc is a region comprising an immunoglobulin heavy chain constant region 2 (CH2), an immunoglobulin heavy chain constant region 3 (CH3), and optionally, an immunoglobulin hinge; and L1, L2, L3 and L4 are amino acid linkers.

[0025] Provided herein is an antigen binding polypeptide complex comprising a first polypeptide, a second polypeptide, and a third polypeptide; wherein the first polypeptide has a structure represented by VL1-VL2-VH2-VH1-CH1; VH1-VH2-VL2-VL1-CH1; VL1-VL2-VH2-VH1-CL; VH1-VH2-VL2-VL1-CL; VL1-VL2-VH2-VH1-CH1-CL; VH1-VH2-VL2-VL1-CH1-CL; VL1-VL2-VH2-VH1-CL-CH1; VH1-VH2-VL2-VL1-CL-CH1; VL1-L1-VL2-L2-VH2-L3-VH1-L4-CH1; VH1-L1-VH2-L2-VL2-L3-VL1-L4-CH1; VL1-L1-VL2-L2-VH2-L3-VH1-L4-CL; VH1-L1-VH2-L2-VL2-L3-VL1-L4-CL; VL1-L1-VL2-L2-VH2-L3-VH1-L4-CH1-L5-CL; VH1-L1-VH2-L2-VL2-L3-VL1-L4-CH1-L5-CL; VL1-L1-VL2-L2-VH2-L3-VH1-L4-CL-L5-CH1; or VH1-L1-VH2-L2-VL2-L3-VL1-L4-CL-L5-CH1; wherein the second polypeptide has a structure represented by VL3-CH1; VL3-CL; VL3-L1-CH1; or VL3-L1-CL; wherein the third polypeptide has a structure represented by VH3-CH1; VH3-CL; VH3-L1-CH1; or VH3-L1-CL; wherein VL1 is a first immunoglobulin light chain variable region; VL2 is a second immunoglobulin light chain variable region; VL3 is a third immunoglobulin light chain variable region; VH1 is a first immunoglobulin heavy chain variable region; VH2 is a second immunoglobulin heavy chain variable region; VH3 is a third immunoglobulin heavy chain variable region; CH1 is an immunoglobulin heavy chain constant region 1; CL is an immunoglobulin light chain constant region; and L1, L2, L3, L4 and L5 are amino acid linkers.

[0026] Provided herein is an antigen binding polypeptide complex comprising a first polypeptide, a second polypeptide, and a third polypeptide; wherein the first polypeptide has a structure represented by VL1-VL2-VH2-VH1; VH1-VH2-VL2-VL1; VL1-L1-VL2-L2-VH2-L3-VH1; VH1-L1-VH2-L2-VL2-L3-VL1; VL1-VL2-VH2-VH1-Fc; VH1-VH2-VL2-VL1-Fc; VL1-L1-VL2-L2-VH2-L3-VH1-Fc; VH1-L1-VH2-L2-VL2-L3-VL1-Fc; VL1-L1-VL2-L2-VH2-L3-VH1-L4-Fc; VH1-L1-VH2-L2-VL2-L3-VL1-L4-Fc; VL1-VL2-VH2-VH1-CH1; VH1-VH2-VL2-VL1-CH1; VL1-VL2-VH2-VH1-CL; VH1-VH2-VL2-VL1-CL; VL1-VL2-VH2-VH1-CH1-CL; VH1-VH2-VL2-VL1-CH1-CL; VL1-VL2-VH2-VH1-CL-CH1; VH1-VH2-VL2-VL1-CL-CH1; VL1-L1-VL2-L2-VH2-L3-VH1-L4-CH1; VH1-L1-VH2-L2-VL2-L3-VL1-L4-CH1; VL1-L1-VL2-L2-VH2-L3-VH1-L4-CL; VH1-L1-VH2-L2-VL2-L3-VL1-L4-CL; VL1-L1-VL2-L2-VH2-L3-VH1-L4-CH1-L5-CL; VH1-L1-VH2-L2-VL2-L3-VL1-L4-CH1-L5-CL; VL1-L1-VL2-L2-VH2-L3-VH1-L4-CL-L5-CH1; VH1-L1-VH2-L2-VL2-L3-VL1-L4-CL-L5-CH1; VL1-VL2-VH2-VH1-CH1-Fc; VH1-VH2-VL2-VL1-CH1-Fc; VL1-VL2-VH2-VH1-CL-Fc; VH1-VH2-VL2-VL1-CL-Fc; VL1-VL2-VH2-VH1-CH1-CL-Fc; VH1-VH2-VL2-VL1-CH1-CL-Fc; VL1-VL2-VH2-VH1-CL-CH1-Fc; VH1-VH2-VL2-VL1-CL-CH1-Fc; VL1-L1-VL2-L2-VH2-L3-VH1-L4-CH1-Fc; VH1-L1-VH2-L2-VL2-L3-VL1-L4-CH1-Fc; VL1-L1-VL2-L2-VH2-L3-VH1-L4-CL-Fc; VH1-L1-VH2-L2-VL2-L3-VL1-L4-CL-Fc; VL1-L1-VL2-L2-VH2-L3-VH1-L4-CH1-L5-CL-Fc; VH1-L1-VH2-L2-VL2-L3-VL1-L4-CH1-L5-CL-Fc; VL1-L1-VL2-L2-VH2-L3-VH1-L4-CL-L5-CH1-Fc; or VH1-L1-VH2-L2-VL2-L3-VL1-L4-CL-L5-CH1-Fc; wherein the second polypeptide has a structure represented by VL3; VL3-Fc; VL3-CH1; VL3-CL; VL3-CH1-CL; VL3-CL-CH1; VL3-CH1-Fc; VL3-CL-Fc; VL3-CH1-CL-Fc; VL3-CL-CH1-Fc; VL3-L1-Fc; VL3-L1-CH1; VL3-L1-CL; VL3-L1-CH1-L2-CL; VL3-L1-CL-L2-CH1; VL3-L1-CH1-L2-Fc; VL3-L1-CL-L2-Fc; VL3-L1-CH1-L2-CL-Fc; or VL3-L1-CL-L2-CH1-Fc; wherein the third polypeptide has a structure represented by VH3; VH3-Fc; VH3-CH1; VH3-CL; VH3-CH1-CL; VH3-CL-CH1; VH3-CH1-Fc; VH3-CL-Fc; VH3-CH1-CL-Fc; VH3-CL-CH1-Fc; VH3-L1-Fc; VH3-L1-CH1; VH3-L1-CL; VH3-L1-CH1-L2-CL; VH3-L1-CL-L2-CH1; VH3-L1-CH1-L2-Fc; VH3-L1-CL-L2-Fc; VH3-L1-CH1-L2-CL-Fc; or VH3-L1-CL-L2-CH1-Fc; wherein VL1 is a first immunoglobulin light chain variable region; VL2 is a second immunoglobulin light chain variable region; VL3 is a third immunoglobulin light chain variable region; VH1 is a first immunoglobulin heavy chain variable region; VH2 is a second immunoglobulin heavy chain variable region; VH3 is a third immunoglobulin heavy chain variable region; Fc is a region comprising an immunoglobulin heavy chain constant region 2 (CH2), an immunoglobulin heavy chain constant region 3 (CH3), and optionally, an immunoglobulin hinge; CH1 is an immunoglobulin heavy chain constant region 1; CL is an immunoglobulin light chain constant region; and L1, L2, L3, L4 and L5 are amino acid linkers.

[0027] Also provided herein is an antigen binding polypeptide complex that specifically binds to a viral peptide or an HIV protein.

[0028] Also provided herein is an antibody or antigen binding fragment thereof comprising an antigen binding polypeptide or antigen binding polypeptide complex described herein.

[0029] Provided herein is a polypeptide having at least 90% identity, at least 95% identity, or 100% identity to any one of SEQ ID NOs:78-92. Also provided herein is a polypeptide encoded by a polynucleotide having at least 90% identity, at least 95% identity, or 100% identity to any one of SEQ ID NOs:93-107.

[0030] Provided herein is a polynucleotide encoding an antigen binding polypeptide or antigen binding polypeptide complex described herein. Also provided herein is a polynucleotide having at least 90% identity, at least 95% identity, or 100% identity to any one of SEQ ID NOs:93-107. Also provided herein is a polynucleotide encoding a polypeptide having at least 90% identity, at least 95% identity, or 100% identity to any one of SEQ ID NOs:78-92.

[0031] Provided herein is a vector comprising a polynucleotide described herein.

[0032] Provided herein is a host cell comprising a polynucleotide or an described herein.

[0033] Provided herein is a chimeric antigen receptor (CAR) comprising the antigen binding polypeptide or antigen binding polypeptide complex described herein.

[0034] Provided herein is an immune cell comprising a CAR described herein.

[0035] Also provided herein is a pharmaceutical composition comprising (i) an antigen binding polypeptide, antigen binding polypeptide complex, antibody or antigen binding fragment thereof, polypeptide, polynucleotide, vector, host cell, CAR, or immune cell described herein, or a combination thereof, and (ii) a pharmaceutically acceptable carrier.

[0036] Provided herein is a kit comprising an antigen binding polypeptide, antigen binding polypeptide complex, antibody or antigen binding fragment thereof, polypeptide, polynucleotide, vector, host cell, CAR, immune cell or pharmaceutical composition described herein, or a combination thereof.

[0037] Also provided herein are specified methods of use of an antigen binding polypeptide, antigen binding polypeptide complex, antibody or antigen binding fragment thereof, polypeptide, polynucleotide, vector, host cell, CAR, immune cell, pharmaceutical composition or kit described herein, or a combination thereof.

### BRIEF DESCRIPTION OF THE DRAWINGS

[0038] Some aspects of the invention are herein described, by way of example only, with reference to the accompanying drawings. With specific reference now to the drawings in detail, it is stressed that the particulars shown are by way of example and for purposes of illustrative discussion of aspects of the invention.

[0039] FIGS. 1A-1E show exemplary configurations of trispecific antibody molecules of the invention. FIG. 1A: bispecific arm paired with scFv-Fc. FIG. 1B: bispecific arm paired with Fab-Fc. FIG. 1C: bispecific arm paired with single-chain Fab (scFab). FIG. 1D: bispecific arm paired with scFv-single chain CL-CH1-Fc. FIG. 1E: bispecific arm fused to CH1 and paired with scFv-CL-Fc.

[0040] FIGS. 2A-2C show ELISA results of trispecific aCD28aCD3/aCD38scFv, aCD28aCD3/aCD38Fab, aCD28aCD3/aCD38scFab, aCD28aCD3/aCD38CLCH1, or isotype control (Control IgG) binding to CD3 (FIG. 2A), CD28 (FIG. 2B), and CD38 (FIG. 2C). Molecule structures are depicted in FIGS. 1A-1D.

[0041] FIG. 3 shows the activation (CD69+) by trispecific antibodies aCD28aCD3L1/aCD38scFv, aCD3aCD28/aCD38scFv, aCD28aCD3/aCD38scFab, aCD3aCD28/aCD38scFab, PMA/IO positive or negative isotype (Control IgG) control, of CD2+ T cells from three different donors.

[0042] FIGS. 4A-4C show in vitro cytolysis of lymphoma tumor cells Z-138 by T cells mediated by trispecific antibodies aCD28aCD3L1/aCD38scFv, aCD3aCD28/aCD38scFv, aCD28aCD3/aCD38scFab, aCD3aCD28/aCD38scFab, PMA/IO or isotype (Control IgG) control from three different donors (FIGS. 4A-4C, respectively).

[0043] FIGS. 5A-5D show ELISA results of trispecific aCD28aCD3CL1CH1/aCD38scFvCL, aCD28aCD3CL1CH1/aCD19scFvCL, or isotype control (Control IgG) binding to CD3 (A), CD28 (B), CD19 (C), and CD38 (D). Molecule structures are depicted in FIG. 1E.

[0044] FIGS. 6A-6F show configurations of exemplary bispecific molecules of the invention from the N-terminus to the C-terminus of the single chain antigen binding polypeptide(s). FIGS. 6A and 6D: bispecific molecules without Fc region. FIG. 6B: bispecific, tetravalent molecule with Fc region. FIGS. 6C, 6E and 6F: bispecific molecules with Fc region. As used in FIGS. 6A-6F, VL1 refers to a first immunoglobulin light chain variable region, VL2 refers to a second immunoglobulin light chain variable region, VH1 refers to a first immunoglobulin heavy chain variable region, and VH2 refers to a second immunoglobulin heavy chain variable region. In FIGS. 6B, 6C and 6F, CH2 refers to an immunoglobulin heavy chain constant region 2, and CH3 refers to an immunoglobulin heavy chain constant region 3. In FIGS. 6A and 6F, 11, 12 and 13 refer to amino acid linkers. In FIG. 6D, L1, L2 and L3 refer to amino acid linkers. In FIGS. 6C and 6F, the circle symbol refers to a knob-into-hole modification.

[0045] FIG. 7 shows SDS-PAGE results of Nickel-NTA (Ni-NTA)-purified bispecific molecules with histidine tags, as depicted in FIG. 6A.

[0046] FIGS. 8A-8B show ELISA results of bispecific molecule aCD19aCD38-His or isotype control (Control IgG) binding to CD19 (FIG. 8A) and CD38 (FIG. 8B).

[0047] FIG. 9 shows SDS-PAGE results of protein A-purified bispecific, tetravalent molecules with LALAPA Fc, as depicted in FIG. 6B.

[0048] FIGS. 10A-10B show ELISA results of bispecific, tetravalent aCD28aCD3LALAPAFc, aCD3aCD28LALAPAFc, or isotype control (Control IgG) binding to CD3 (FIG. 10A) and CD28 (FIG. 10B). Molecule structures are depicted in FIG. 6C.

[0049] FIG. 11 shows nuclear factor of activated T-cells (NFAT) pathway activation by bispecific, tetravalent aCD28aCD3L1LALAPAFc or aCD3aCD28L1LALAPAFc, or anti-CD3 and anti-CD28 mAbs using NFAT promoter-luciferase expressing human Jurkat T cells.

[0050] FIGS. 12A-12B show ELISA results of bispecific aCD28aCD3LALAPAFc or aCD3aCD28LALAPAFc, or isotype control (Control IgG) binding to CD3 (FIG. 12A) and CD28 (FIG. 12B) Molecule structures are depicted in FIG. 6C.

[0051] FIGS. 13A-13C show configurations of exemplary tetraspecific molecules of the invention. VL1 refers to a first immunoglobulin light chain variable region. VL2 refers to a second immunoglobulin light chain variable region. VL3 refers to a third immunoglobulin light chain variable region. VL4 refers to a fourth immunoglobulin light chain variable region. VH1 refers to a first immunoglobulin heavy chain variable region. VH2 refers to a second immunoglobulin heavy chain variable region. VH3 refers to a third immunoglobulin heavy chain variable region. VH4 refers to a fourth immunoglobulin heavy chain variable region. CH1 refers to an immunoglobulin heavy chain constant region 1. CH2 refers to an immunoglobulin heavy chain constant region 2. CH3 refers to an immunoglobulin heavy chain constant region 3. CL refers to an immunoglobulin light chain constant region. The circle symbol in FIGS. 13A-13C refers to a knob-into-hole modification.

[0052] FIGS. 14A-14D show ELISA results of tetraspecific aCD28aCD3CD19CD38LALAPAFc, aCD3aCD28CD19CD38LALAPAFc, aCD28aCD3CD19CD38LALAPAFc, or aCD28aCD3CD38CD19LALAPAFc, or isotype control (Control IgG) binding to CD3 (FIG. 14A), CD28 (FIG. 14B), CD19 (FIG. 14C), and CD38 (FIG. 14D). Molecule structures are depicted in FIG. 13A.

[0053] FIG. 15 shows NFκB pathway activation by tetraspecific aCD28aCD3/aCD19CD38L1LALAPAFc or aCD3aCD28/CD19CD38L1LALAPAFc, or anti-CD3 mAbs using NFκB promoter-luciferase expressing human Jurkat T cells.

[0054] FIGS. 16A-16B show activation (CD69+) by tetraspecific molecules aCD28aCD3/aCD19CD38L1LALAPAFc or aCD3aCD28/CD19CD38L1LALAPAFc, or anti-CD3 mAb, of CD4+(FIG. 16A) or CD8+(FIG. 16B) T cells from three different donors.

[0055] FIG. 17 shows both orientation and linker can affect expression of tetraspecific molecules.

[0056] FIGS. 18A-18D show ELISA results of tetraspecific aCD28aCD3CD19CD38LALAPAFc with different linker lengths as depicted in FIG. 17, or isotype control (Control IgG) binding to CD3 (FIG. 18A), CD28 (FIG. 18B), CD19 (FIG. 18C), and CD38 (FIG. 18D).

[0057] FIGS. 19A-19D show ELISA results of tetraspecific aCD28aCD3CH1/CD19CD38CL LALAPAFc with different linkers as depicted in FIG. 13B, or isotype control (Control IgG) binding to CD3 (FIG. 19A), CD28 (FIG. 19B), CD38 (FIG. 19C), and CD19 (FIG. 19D).

[0058] FIGS. 20A-20D show ELISA results of tetraspecific aCD28aCD3CD38CD19LALAPAFc, aCD28aCD3CD38CD19LALAPAFc, aCD28aCD3CD38CD19LALAPAFc, or aCD3aCD28CD19CD38LALAPAFc, or isotype control (Control IgG) binding to CD3 (FIG. 20A), CD28 (FIG. 20B), CD38 (FIG. 20C), and CD19 (FIG. 20D). Molecule structures are depicted in FIG. 13C.

[0059] FIGS. 20E-20H show ELISA results of tetraspecific aCD28aCD3L1/aCD38aCD19L1_HHLL, aCD28aCD3L1/aCD19aCD38L1_HHLL, aCD3aCD28L1/aCD38aCD19L1_HHLL, aCD3aCD28L1/aCD19aCD38L1_HHLL, or isotype control (Control HuIgG) binding to CD3 (FIG. 20E), CD28 (FIG. 20F), CD38 (FIG. 20G), and CD19 (FIG. 20H).

[0060] FIGS. 21A-21D show configurations of exemplary bispecific molecules of the invention. VL1 refers to a first immunoglobulin light chain variable region. VL2 refers to a second immunoglobulin light chain variable region. VL3 refers to a third immunoglobulin light chain variable region. VL4 refers to a fourth immunoglobulin light chain variable region. VH refers to a first immunoglobulin heavy chain variable region. VH2 refers to a second immunoglobulin heavy chain variable region. VH3 refers to a third immunoglobulin heavy chain variable region. VH4 refers to a fourth immunoglobulin heavy chain variable region. CH3 refers to an immunoglobulin heavy chain constant region 3.

[0061] FIG. 22 shows non-limiting examples of different configurations of tetraspecific antibody molecules. vL1 is a first immunoglobulin light chain variable region. vL2 is a second immunoglobulin light chain variable region. vL3 is a third immunoglobulin light chain variable region. vL4 is a fourth immunoglobulin light chain variable region. vH1 is a first immunoglobulin heavy chain variable region. vH2 is a second immunoglobulin heavy chain variable region. vH3 is a third immunoglobulin heavy chain variable region. vH4 is a fourth immunoglobulin heavy chain variable region. CH2 is an immunoglobulin heavy chain constant region 2. CH3 is an immunoglobulin heavy chain constant region 3. The circle symbol in the CH3 region indicates a knob-into-hole modification.

[0062] FIGS. 23A-23D show ELISA results of tetraspecific aCD28aCD3LHaCD38/aCD19scFv, aCD28aCD3HLaCD38/aCD19scFv, or isotype control (Control IgG) binding to CD3 (FIG. 23A), CD28 (FIG. 23B), CD38 (FIG. 23C), and CD19 (FIG. 23D). Molecule structures are depicted in FIG. 22.

[0063] FIG. 24 shows non-limiting examples of different configurations of pentaspecific antibody molecules. vL1 is a first immunoglobulin light chain variable region. vL2 is a second immunoglobulin light chain variable region. vL3 is a third immunoglobulin light chain variable region. vL4 is a fourth immunoglobulin light chain variable region. vL5 is a fifth immunoglobulin light chain variable region. vH1 is a first immunoglobulin heavy chain variable region. vH2 is a second immunoglobulin heavy chain variable region. vH3 is a third immunoglobulin heavy chain variable region. vH4 is a fourth immunoglobulin heavy chain variable region. vH5 is a fifth immunoglobulin heavy chain variable region. CH2 is an immunoglobulin heavy chain constant region 2. CH3 is an immunoglobulin heavy chain constant region 3. The circle symbol in the CH3 region indicates a knob-into-hole modification.

[0064] FIGS. 25A-25D show ELISA results of tetraspecific aCD28aCD3LHaCD38/aCD19aCD20, aCD28aCD3LHaCD38/aCD20aCD19, aCD28aCD3HLaCD38/aCD19aCD20, aCD28aCD3HLaCD38/aCD20aCD19, or isotype control (Control IgG) binding to CD3 (FIG. 8A), CD28 (FIG. 8B), CD38 (FIG. 8C), and CD19 (FIG. 8D). Molecule structures are depicted in FIG. 24.

[0065] FIG. 26 shows additional non-limiting examples of different configurations of tetraspecific antibody molecules.

[0066] FIG. 27 depicts an exemplary configuration of a masked tetraspecific antibody. Variable domains (Fv) of the antibody are shown as heavy chain/light chain pairs, with Fv1-Fv3 targeting tumor associated antigens (TAAs) or immune costimulatory receptors, and a fourth Fv targeting CD3 (aCD3 or aCD3). In some aspects, linkers between Fv3 and aCD3 contain one or more protease recognition sites.

[0067] FIG. 28 shows SDS-PAGE results of in vitro cleavage of exemplary masked tetraspecific molecules as depicted. Molecules were treated with either MTP or MMP9 protease as specified.

[0068] FIG. 29 shows ELISA binding results of exemplary masked tetraspecific molecules as depicted in FIG. 27, or negative isotype (Control IgG1), with or without protease treatment. Molecules cleaved or not cleaved by MTP or MMP9 as specified were tested for binding affinity to Trop2 and cMet.

[0069] FIG. 30 shows ELISA binding results of exemplary masked tetraspecific molecules as depicted in FIG. 27, or negative isotype (Control IgG1), with or without protease treatment. Molecules cleaved or not cleaved by MTP or MMP9 as specified were tested for binding affinity to CD28.

[0070] FIG. 31 shows ELISA binding results of exemplary masked tetraspecific molecules as depicted in FIG. 27, or negative isotype (Control IgG1), with or without protease treatment. Molecules cleaved or not cleaved by MTP or MMP9 as specified were tested for binding affinity to CD3.

[0071] FIG. 32 shows cytolysis of HCC1954 tumor cells by PBMCs (E:T:10:1) mediated by exemplary masked tetraspecific molecules as depicted in FIG. 27, or negative isotype (Control IgG1), from PBMCs of two donors (KP63250 and KP63251).

[0072] FIG. 33 shows ELISA binding results of exemplary non-masked tetraspecific molecules as depicted, or negative isotype (hIgG1LALPA) control, to their respective targets of hTrop2, hcMet, hCD28, and hCD3.

[0073] FIG. 34 shows CD69+ activation by exemplary non-masked tetraspecific molecules, or negative isotype (IgG1LALPA) control, of CD2+ T cells from PBMCs of two different donors.

[0074] FIG. 35 shows an additional non-limiting example of a tetraspecific antibody molecule.

[0075] FIG. 36A shows a further non-limiting example of a tetravalent, bispecific antibody configuration, called MX846. MX846 was analyzed for binding to CD3 by biolayer interferometry (BLI) (FIG. 36B), and to CD20 by flow cytometry (FIG. 36C).

[0076] FIG. 37A shows a further non-limiting example of a tetravalent, trispecific antibody configuration, called MX855. MX855 was analyzed for binding to CD3 and CD28 by biolayer interferometry (BLI) (FIG. 37B), and to CD20 by flow cytometry (FIG. 37C).

[0077] FIG. 38A shows a further non-limiting example of a tetraspecific antibody configuration, called MX851. MX851 was analyzed for binding to CD3, CD28 and BCMA by biolayer interferometry (BLI) (FIG. 38B), and to CD20 by flow cytometry (FIG. 38C).

[0078] FIG. 39A shows a further non-limiting example of a tetraspecific antibody configuration, called MX853. MX853 was analyzed for binding to CD3, CD28 and BCMA by biolayer interferometry (BLI) (FIG. 39B), and to CD20 by flow cytometry (FIG. 39C).

[0079] FIGS. 40A-40B show killing of Mantle Cell lymphoma cell line Z-138 by T-cells mediated by tetravalent, tetraspecific MX851 (FIG. 40A) and tetravalent, trispecific MX855 (FIG. 40B).

[0080] FIG. 41A shows a further non-limiting example of a trispecific antibody configuration, called MX894 (VRC01scFv/PGT121x10e8v4L1IgG1LS). MX894 was analyzed for binding to 10e8 fusion peptide (FIG. 41B), and CD4 site-dependent (FIG. 41C) and CD4 site-independent (FIG. 41D) HIV spike protein by biolayer interferometry (BLI).

[0081] FIG. 42A shows a further non-limiting example of a tetraspecific antibody configuration, called MX873 (VRC26.25×10-1074L9/VRC01×PGT121L1 IgG1LS). MX873 was analyzed for binding to CD4 site-dependent (FIG. 42B) and CD4 site-independent (FIG. 42C) HIV spike protein by biolayer interferometry (BLI).

[0082] FIG. 43A shows a further non-limiting example of a tetraspecific antibody configuration, called MX875 (10-1074×VRC26.25L9/VRC01×PGT121L1 IgG1LS). MX875 was analyzed for binding to CD4 site-dependent (FIG. 43B) and CD4 site-independent (FIG. 43C) HIV spike protein by biolayer interferometry (BLI).

[0083] FIG. 44A shows a further non-limiting example of a tetraspecific antibody configuration, called MX877 (STAR_VRC26.25×PGT128L9/STAR_VRC01×PGT121L1 IgG1LS). MX877 was analyzed for binding to CD4 site-dependent (FIG. 44B) and CD4 site-independent (FIG. 44C) HIV spike protein by biolayer interferometry (BLI).

[0084] FIG. 45A shows a further non-limiting example of a trivalent, bispecific antibody configuration, called MX848. MX848 was analyzed for binding to CD3 by biolayer interferometry (BLI) (FIG. 45B), and binding to CD20 by flow cytometry (FIG. 45C).

[0085] FIG. 46A shows a further non-limiting example of a trispecific antibody configuration, called MX857. MX857 was analyzed for binding to CD3 and CD28 by biolayer interferometry (BLI) (FIG. 46B), and binding to CD20 by flow cytometry (FIG. 46C). FIG. 46D shows killing of Mantle Cell lymphoma cell line Z-138 by T-cells mediated by MX857.

### DETAILED DESCRIPTION OF THE INVENTION

[0086] The invention is directed to antigen binding polypeptides and antigen binding polypeptide complexes (e.g., antibodies or antigen binding fragments thereof) having improved features. In some aspects, the invention enables the generation of multispecific and multifunctional antigen binding polypeptides and antigen binding polypeptide complexes through the expression of complementary self-assembling heavy and light chains expressed with a single polypeptide per arm and, optionally, with the addition of specific amino acid linkers. Because of this multifunctionality, antigen binding polypeptides and antigen binding polypeptide complexes of the invention can bind to specific combinations of target molecules for selectivity or breadth/neutralization, bring together two or more cell types, bring together targets and deliver activation signals, modify the disease microenvironment, and enhance avidity of binding for improved potency.

[0087] Various terms relating to aspects of disclosure are used throughout the specification and claims. Such terms are to be given their ordinary meaning in the art, unless otherwise indicated. Other specifically defined terms are to be construed in a manner consistent with the definition provided herein.

### Definitions

[0088] As used herein, the term “antigen binding polypeptide” refers to a polypeptide having the ability to specifically bind to one or more substances that induce an immune response (i.e., one or more antigens or epitopes).

[0089] As used herein, the term “antigen binding polypeptide complex” refers to a group of two, three, four, or more associated polypeptides, wherein at least one polypeptide has the ability to specifically bind to one or more antigens. An antigen binding polypeptide complex, includes, but is not limited to, an antibody or antigen binding fragment thereof.

[0090] The term “antibody” includes, without limitation, a glycoprotein immunoglobulin which binds specifically to an antigen and comprises at least two heavy (H) chains and two light (L) chains interconnected by disulfide bonds. Each H chain comprises a heavy chain variable region (abbreviated herein as VH) and a heavy chain constant region. The heavy chain constant region comprises three constant domains, CH1, CH2 and CH3. Each light chain comprises a light chain variable region (abbreviated herein as VL) and a light chain constant region. The light chain constant region comprises one constant domain, CL. The VH and VL regions can be further subdivided into regions of hypervariability, termed complementarity determining regions (CDRs), interspersed with regions that are more conserved, termed framework regions (FR). Each VH and VL comprises three CDRs and four FRs, arranged from amino-terminus to carboxy-terminus in the following order: FR1, CDR1, FR2, CDR2, FR3, CDR3, FR4. The variable regions of the heavy and light chains contain a binding domain that interacts with an antigen. The constant regions of the antibodies may mediate the binding of the immunoglobulin to host tissues or factors, including various cells of the immune system (e.g., effector cells) and the first component (Cl9) of the classical complement system. A heavy chain may have the C-terminal lysine or not. Unless specified otherwise herein, the amino acids in the variable regions are numbered using the Kabat numbering system and those in the constant regions are numbered using the EU system.

[0091] The term “monoclonal antibody,” as used herein, refers to an antibody that is produced by a single clone of B-cells and binds to the same epitope. In contrast, the term “polyclonal antibody” refers to a population of antibodies that are produced by different B-cells and bind to different epitopes of the same antigen. The term “antibody” includes, by way of example, monoclonal and polyclonal antibodies; chimeric and humanized antibodies; human or non-human antibodies; wholly synthetic antibodies; and single chain antibodies. A non-human antibody can be humanized by recombinant methods to reduce its immunogenicity in man.

[0092] The antibody can be an antibody that has been altered (e.g., by mutation, deletion, substitution, conjugation to a non-antibody moiety). For example, an antibody can include one or more variant amino acids (compared to a naturally occurring antibody) which change a property (e.g., a functional property) of the antibody. For example, several such alterations are known in the art which affect, e.g., half-life, effector function, and/or immune responses to the antibody in a patient. The term antibody also includes artificial polypeptide constructs which comprise at least one antibody-derived antigen binding site.

[0093] An “antigen binding fragment” of an antibody refers to one or more fragments or portions of an antibody that retain the ability to bind specifically to the antigen bound by the whole antibody. It has been shown that the antigen-binding function of an antibody can be performed by fragments or portions of a full-length antibody. An antigen binding fragment can contain the antigenic determining regions of an intact antibody (e.g., the complementarity determining regions (CDRs)). Examples of antigen binding fragments of antibodies include, but are not limited to, Fab, Fab′, F(ab′)₂, and Fv fragments, linear antibodies, and single chain antibodies. An antigen binding fragment of an antibody can be derived from any animal species, such as rodents (e.g., mouse, rat, or hamster) and humans or can be artificially produced.

[0094] Furthermore, although the two domains of the Fv fragment, VL and VH, are coded for by separate genes, they can be joined, using recombinant methods, by a synthetic linker that enables them to be made as a single protein chain in which the VL and VH regions pair to form monovalent molecules (known as single chain Fv (scFv); see, e.g., Bird et al. (1988) Science 242:423-426; and Huston et al. (1988) Proc. Natl. Acad. Sci. USA 85:5879-5883). Such single chain antibodies are also intended to be encompassed within the term “antigen-binding fragment” of an antibody.

[0095] Antigen binding fragments are obtained using conventional techniques known to those with skill in the art, and the fragments are screened for utility in the same manner as are intact antibodies. Antigen binding fragments can be produced by recombinant DNA techniques, or by enzymatic or chemical cleavage of intact immunoglobulins.

[0096] As used herein, the term “variable region” typically refers to a portion of an antibody, generally, a portion of a light or heavy chain, typically about the amino-terminal 110 to 120 amino acids, or 110 to 125 amino acids in the mature heavy chain and about 90 to 115 amino acids in the mature light chain, which differ extensively in sequence among antibodies and are used in the binding and specificity of a particular antibody for its particular antigen. The variability in sequence is concentrated in those regions called complementarity determining regions (CDRs) while the more highly conserved regions in the variable domain are called framework regions (FR). Without wishing to be bound by any particular mechanism or theory, it is believed that the CDRs of the light and heavy chains are primarily responsible for the interaction and specificity of an antibody with antigen. In some aspects, the variable region is a mammalian variable region, e.g., a human, mouse or rabbit variable region. In some aspects, the variable region comprises rodent or murine CDRs and human framework regions (FRs). In some aspects, the variable region is a primate (e.g., non-human primate) variable region. In some aspects, the variable region comprises rodent or murine CDRs and primate (e.g., non-human primate) framework regions (FRs).

[0097] The terms “complementarity determining region” or “CDR”, as used herein, refer to each of the regions of an antibody variable domain which are hypervariable in sequence and/or form structurally defined loops (hypervariable loops) and/or contain the antigen-contacting residues. Antibodies can comprise six CDRs, e.g., three in the VH and three in the VL.

[0098] The terms “VL”, “VL region,” and “VL domain” are used herein interchangeably to refer to the light chain variable region of an antigen binding polypeptide, antigen binding polypeptide complex, antibody or antigen binding fragment thereof. In some aspects, a VL region is referred to herein as VL1 to denote a first light chain variable region, VL2 to denote a second light chain variable region, VL3 to denote a third light chain variable region, and so on. An enumerated VL region (e.g., VL1) can have the same or different antigen binding properties and/or the same or different sequence as another enumerated VL region (e.g., VL2).

[0099] The terms “VH”, “VH region,” and “VH domain” are used herein interchangeably to refer to the heavy chain variable region of an antigen binding polypeptide, antigen binding polypeptide complex, antibody or antigen binding fragment thereof. In some aspects, a VH region is referred to herein as VH1 to denote a first heavy chain variable region, VH2 to denote a second heavy chain variable region, VH3 to denote a third heavy chain variable region, and so on. An enumerated VH region (e.g., VH1) can have the same or different antigen binding properties and/or the same or different sequence as another enumerated VH region (e.g., VH2).

[0100] As used herein, “Kabat numbering” and like terms are recognized in the art and refer to a system of numbering amino acid residues in the heavy and light chain variable regions of an antibody or antigen binding fragment thereof. In some aspects, CDRs can be determined according to the Kabat numbering system (see, e.g., Kabat E A & Wu T T (1971) Ann NY Acad Sci 190: 382-391 and Kabat E A et al., (1991) Sequences of Proteins of Immunological Interest, Fifth Edition, U.S. Department of Health and Human Services, NIH Publication No. 91-3242). Using the Kabat numbering system, CDRs within an antibody heavy chain molecule are typically present at amino acid positions 31 to 35, which optionally can include one or two additional amino acids, following 35 (referred to in the Kabat numbering scheme as 35A and 35B) (CDR1), amino acid positions 50 to 65 (CDR2), and amino acid positions 95 to 102 (CDR3). Using the Kabat numbering system, CDRs within an antibody light chain molecule are typically present at amino acid positions 24 to 34 (CDR1), amino acid positions 50 to 56 (CDR2), and amino acid positions 89 to 97 (CDR3).

[0101] As used herein, the terms “constant region” or “constant domain” are used interchangeably to refer to a portion of an antigen binding polypeptide, antigen binding polypeptide complex, antibody or antigen binding fragment thereof, e.g., a carboxyl terminal portion of a light and/or heavy chain which is not directly involved in binding of an antibody to antigen but which can exhibit various effector functions, such as interaction with the Fc region. The constant region generally has a more conserved amino acid sequence relative to a variable region. In some aspects, an antigen binding polypeptide, antigen binding polypeptide complex, antibody or antigen binding fragment thereof comprises a constant region or portion thereof that is sufficient for antibody-dependent cell-mediated cytotoxicity (ADCC), antibody-dependent cellular phagocytosis (ADCP), and complement-dependent cytotoxicity (CDC).

[0102] As used herein, the terms “fragment crystallizable region,” “Fc region,” or “Fc domain” are used interchangeably herein to refer to the tail region of an antibody that interacts with cell surface receptors called Fc receptors and some proteins of the complement system. Fc regions typically comprise CH2 and CH3 regions, and, optionally, an immunoglobulin hinge. Examples of an Fc region include, but are not limited to, an amino acid sequence of any one of SEQ ID NOs:375-388, or an amino acid sequence having at least 80%, at least 85%, at least 90%, at least 95%, at least 96%, at least 97%, at least 98%, or at least 99% identity to any one of SEQ ID NOs:375-388. Examples of a CH2 region include, but are not limited to, an amino acid sequence of any one of SEQ ID NOs:394-399, or an amino acid sequence having at least 80%, at least 85%, at least 90%, at least 95%, at least 96%, at least 97%, at least 98%, or at least 99% identity to any one of SEQ ID NOs:394-399. Examples of a CH3 region include, but are not limited to, an amino acid sequence of any one of SEQ ID NOs:400-403, or an amino acid sequence having at least 80%, at least 85%, at least 90%, at least 95%, at least 96%, at least 97%, at least 98%, or at least 99% identity to any one of SEQ ID NOs:400-403.

[0103] As used herein, the terms “immunoglobulin hinge,” “hinge,” “hinge domain” or “hinge region” are used interchangeably to refer to a stretch of heavy chains between the Fab and Fc portions of an antigen binding polypeptide, antigen binding polypeptide complex, antibody or antigen binding fragment thereof. A hinge provides structure, position and flexibility, which assist with normal functioning of antibodies (e.g., for crosslinking two antigens or binding two antigenic determinants on the same antigen molecule). An immunoglobulin hinge is divided into upper, middle and lower hinge regions that can be separated based on structural and/or genetic components. An immunoglobulin hinge of the invention can contain one, two or all three of these regions. Structurally, the upper hinge region stretches from the C terminal end of CH1 to the first hinge disulfide bond. The middle hinge region stretches from the first cysteine to the last cysteine in the hinge. The lower hinge region extends from the last cysteine to the glycine of CH2. The cysteines present in the hinge form interchain disulfide bonds that link the immunoglobulin monomers.

[0104] As used herein, the term “Fab” refers to a region of an antibody that binds to an antigen. It is typically composed of one constant and one variable domain of each of the heavy and the light chain.

[0105] As used herein, the term “heavy chain” refers to a portion of an antigen binding polypeptide, antigen binding polypeptide complex, antibody or antigen binding fragment thereof typically composed of a heavy chain variable region (VH), a heavy chain constant region 1 (CH1), a heavy chain constant region 2 (CH2), and a heavy chain constant region 3 (CH3). A typical antibody is composed of two heavy chains and two light chains. When used in reference to an antibody, a heavy chain can refer to any distinct type, e.g., alpha (α), delta (δ), epsilon (ε), gamma (γ), and mu (μ), based on the amino acid sequence of the constant region, which gives rise to IgA, IgD, IgE, IgG, and IgM classes of antibodies, respectively, including subclasses of IgG, e.g., IgG1, IgG2, IgG3, and IgG4. Heavy chain amino acid sequences are known in the art. In some aspects, the heavy chain is a human heavy chain.

[0106] As used herein, the term “light chain” refers to a portion of an antigen binding polypeptide, antigen binding polypeptide complex, antibody or antigen binding fragment thereof typically composed of a light chain variable region (VL) and a light chain constant region (CL). A typical antibody is composed of two light chains and two heavy chains. When used in reference to an antibody, a light chain can refer to any distinct type, e.g., kappa (κ) or lambda (λ), based on the amino acid sequence of the constant region. Light chain amino acid sequences are known in the art. In some aspects, the light chain is a human light chain.

[0107] The term “chimeric” antibody or antigen binding fragment thereof refers to an antibody or antigen binding fragments thereof wherein the amino acid sequence is derived from two or more species. Typically, the variable region of both light and heavy chains corresponds to the variable region of antibodies or antigen binding fragments thereof derived from one species of mammals (e.g., mouse, rat, rabbit, etc.) with the desired specificity, affinity and capability, while the constant regions are homologous to the sequences in antibodies or antigen binding fragments thereof derived from another (usually human) to avoid eliciting an immune response in that species.

[0108] The term “humanized” antibody or antigen binding fragment thereof refers to forms of non-human (e.g., murine) antibodies or antigen binding fragments that are specific immunoglobulin chains, chimeric immunoglobulins, or fragments thereof that contain minimal non-human (e.g., murine) sequences. Typically, humanized antibodies or antigen binding fragments thereof are human immunoglobulins in which residues from a complementary determining region (CDR) are replaced by residues from a CDR of a non-human species (e.g., mouse, rat, rabbit, hamster) that have the desired specificity, affinity, and capability (Jones et al., Nature 321:522-525 (1986); Riechmann et al., Nature 332:323-327 (1988); Verhoeyen et al., Science 239:1534-1536 (1988)). In some aspects, the Fv framework region (FR) residues of a human immunoglobulin are replaced with the corresponding residues in an antibody or fragment from a non-human species that has the desired specificity, affinity, and capability. The humanized antibody or antigen binding fragment thereof can be further modified by the substitution of additional residues either in the Fv framework region and/or within the replaced non-human residues to refine and optimize antibody or antigen-binding fragment thereof specificity, affinity, and/or capability. In general, a humanized antibody or antigen binding fragment thereof will comprise substantially all of at least one, and typically two or three, variable domains containing all or substantially all of the CDR regions that correspond to the non-human immunoglobulin whereas all or substantially all of the FR regions are those of a human immunoglobulin consensus sequence. A humanized antibody or antigen binding fragment thereof can also comprise at least a portion of a constant region, typically that of a human immunoglobulin. Examples of methods used to generate humanized antibodies are known and described, for example, in U.S. Pat. No. 5,225,539; Roguska et al., Proc. Natl. Acad. Sci., USA, 91(3):969-973 (1994), and Roguska et al., Protein Eng. 9(10):895-904 (1996).

[0109] The term “human” antibody or antigen binding fragment thereof, as used herein, means an antibody or antigen binding fragment thereof having an amino acid sequence derived from a human immunoglobulin gene locus, where such antibody or antigen binding fragment is made using recombinant techniques known in the art. This definition of a human antibody or antigen binding fragment thereof includes intact or full-length antibodies and fragments thereof.

[0110] A polypeptide, polypeptide complex, antibody, antigen binding fragment thereof, polynucleotide, vector, chimeric antigen receptor (CAR) or cell which is “isolated” is a polypeptide, polypeptide complex, antibody, antigen binding fragment thereof, polynucleotide, vector, CAR or cell which is in a form not found in nature. Isolated polypeptides, polypeptide complexes, antibodies, antigen binding fragments thereof, polynucleotides, vectors, CARs or cells include those which have been purified to a degree that they are no longer in a form in which they are found in nature. In some aspects, a polypeptide, polypeptide complex, antibody, antigen binding fragment thereof, polynucleotide, vector, CAR or cell which is isolated is substantially pure. As used herein, “substantially pure” refers to material which is at least 50% pure (i.e., free from contaminants), at least 90% pure, at least 95% pure, at least 98% pure, or at least 99% pure.

[0111] The terms “polypeptide,” “peptide,” and “protein” are used interchangeably herein to refer to polymers of amino acids of any length. The polymer can be linear or branched, it can comprise modified amino acids, and it can be interrupted by non-amino acids. The terms also encompass an amino acid polymer that has been modified naturally or by intervention; for example, disulfide bond formation, glycosylation, lipidation, acetylation, phosphorylation, or any other manipulation or modification, such as conjugation with a labeling component. Also included within the definition are, for example, polypeptides containing one or more analogs of an amino acid (including, for example, unnatural amino acids, etc.), as well as other modifications known in the art. It is understood that, because the polypeptides of this invention are based upon antibodies, in some aspects, the polypeptides can occur as single chains or associated chains.

[0112] The use of the alternative (e.g., “or”) should be understood to mean either one, both, or any combination thereof of the alternatives. As used herein, the indefinite articles “a” or “an” should be understood to refer to “one or more” of any recited or enumerated component.

[0113] As used herein, the term “and/or” is to be taken as specific disclosure of each of the two specified features or components with or without the other. Thus, the term “and/or” as used in a phrase such as “A and/or B” herein is intended to include “A and B,” “A or B,” “A” (alone), and “B” (alone). Likewise, the term “and/or” as used in a phrase such as “A, B, and/or C” is intended to encompass each of the following aspects: A, B, and C; A, B, or C; A or C; A or B; B or C; A and C; A and B; B and C; A (alone); B (alone); and C (alone).

[0114] It is understood that wherever aspects are described herein with the language “comprising,” “having” and the like, otherwise analogous aspects described in terms of “consisting of” and/or “consisting essentially of” are also provided.

[0115] As used herein, the term “about” refers to a value or composition that is within an acceptable error range for the particular value or composition as determined by one of ordinary skill in the art, which will depend in part on how the value or composition is measured or determined, i.e., the limitations of the measurement system. For example, “about” can mean within 1 or more than 1 standard deviation per the practice in the art. Alternatively, “about” can mean a range of up to 10% or 20% (i.e., ±10% or +20%). For example, about 3 mg can include any number between 2.7 mg and 3.3 mg (for 10%) or between 2.4 mg and 3.6 mg (for 20%). Furthermore, particularly with respect to biological systems or processes, the terms can mean up to an order of magnitude or up to 5-fold of a value. When particular values or compositions are provided in the application and claims, unless otherwise stated, the meaning of “about” should be assumed to be within an acceptable error range for that particular value or composition.

[0116] As described herein, any numerical range, concentration range, percentage range, ratio range or integer range is to be understood to include the value of any integer within the recited range and, when appropriate, fractions thereof (such as one-tenth and one-hundredth of an integer), unless otherwise indicated.

[0117] Unless defined otherwise, all technical and scientific terms used herein have the same meaning as commonly understood by one of ordinary skill in the art to which this disclosure is related. For example, the Concise Dictionary of Biomedicine and Molecular Biology, Juo, Pei-Show, 2nd ed., 2002, CRC Press; The Dictionary of Cell and Molecular Biology, 5th ed., 2013, Academic Press; and the Oxford Dictionary Of Biochemistry And Molecular Biology, 2006, Oxford University Press, provide one of skill with a general dictionary of many of the terms used in this disclosure.

[0118] Units, prefixes, and symbols are denoted in their Système International de Unites (SI) accepted form. Numeric ranges are inclusive of the numbers defining the range. The headings provided herein are not limitations of the various aspects of the disclosure, which can be had by reference to the specification as a whole. Accordingly, the terms defined herein are more fully defined by reference to the specification in its entirety.

[0119] Various aspects are described in further detail in the following sections.

### Antigen Binding Polypeptides and Antigen Binding Polypeptide Complexes

[0120] In some aspects, the invention is directed to antigen binding polypeptides and antigen binding polypeptide complexes having certain structural features.

[0121] In some aspects, the invention is directed to an antigen binding polypeptide complex (e.g., an antibody or antigen binding fragment thereof) comprising a first polypeptide having a structure represented by VL1-VL2-VH2-VH1 or VH1-VH2-VL2-VL1 and a second polypeptide having a structure of VL3-VH3 or VH3-VL3. In another aspect, the invention is directed to an antigen binding polypeptide complex comprising a first polypeptide having a structure represented by VL1-VL2-VH2-VH1 or VH1-VH2-VL2-VL1, a second polypeptide having a structure represented by VL3, and a third polypeptide having a structure represented by VH3. In some aspects, the antigen binding polypeptide complex contains an amino acid linker between any two regions denoted in a structure described herein. In some aspects, the antigen binding polypeptide complex contains an Fc region, CH1 region, CL region, or any combination thereof. In some aspects, the Fc region, CH1 region, CL region and/or CH3 is located at the carboxy terminus of the antigen binding polypeptide, and is optionally linked to the polypeptide by at least one amino acid linker. In some aspects, the Fc region comprises an amino acid sequence of any one of SEQ ID NOs:375-388 or an amino acid sequence having at least 80%, at least 85%, at least 90%, at least 95%, at least 96%, at least 97%, at least 98%, or at least 99% identity to any one of SEQ ID NOs:375-388. In some aspects, the CH1 region comprises an amino acid sequence of any one of SEQ ID NOs:389-393 or an amino acid sequence having at least 80%, at least 85%, at least 90%, at least 95%, at least 96%, at least 97%, at least 98%, or at least 99% identity to any one of SEQ ID NOs:389-393. In some aspects, the CL region comprises an amino acid sequence of SEQ ID NO:404 or 405 or an amino acid sequence having at least 80%, at least 85%, at least 90%, at least 95%, at least 96%, at least 97%, at least 98% or at least 99% identity to SEQ ID NO:404 or 405. In another aspect, the antigen binding polypeptide complex is an antibody or antigen binding fragment thereof.

[0122] In some aspects, the invention is directed to an antigen binding polypeptide complex comprising a first polypeptide and a second polypeptide; wherein the first polypeptide has a structure represented by VL1-VL2-VH2-VH1; VH1-VH2-VL2-VL1; VL1-L1-VL2-L2-VH2-L3-VH1; or VH1-L1-VH2-L2-VL2-L3-VL1; wherein the second polypeptide has a structure represented by VL3-VH3; VH3-VL3; VL3-L4-VH3; or VH3-L4-VL3; wherein VL1 is a first immunoglobulin light chain variable region; VL2 is a second immunoglobulin light chain variable region; VL3 is a third immunoglobulin light chain variable region; VH1 is a first immunoglobulin heavy chain variable region; VH2 is a second immunoglobulin heavy chain variable region; VH3 is a third immunoglobulin heavy chain variable region; and L1, L2, L3 and L4 are amino acid linkers. In some aspects, the first polypeptide has a structure represented by VL1-VL2-VH2-VH1 and the second polypeptide has a structure represented by VL3-VH3. In some aspects, the first polypeptide has a structure represented by VL1-VL2-VH2-VH1 and the second polypeptide has a structure represented by VH3-VL3. In some aspects, the first polypeptide has a structure represented by VL1-VL2-VH2-VH1 and the second polypeptide has a structure represented by VL3-L4-VH3. In some aspects, the first polypeptide has a structure represented by VL1-VL2-VH2-VH1 and the second polypeptide has a structure represented by VH3-L4-VL3. In some aspects, the first polypeptide has a structure represented by VH1-VH2-VL2-VL1 and the second polypeptide has a structure represented by VL3-VH3. In some aspects, the first polypeptide has a structure represented by VH1-VH2-VL2-VL1 and the second polypeptide has a structure represented by VH3-VL3. In some aspects, the first polypeptide has a structure represented by VH1-VH2-VL2-VL1 and the second polypeptide has a structure represented by VL3-L4-VH3. In some aspects, the first polypeptide has a structure represented by VH1-VH2-VL2-VL1 and the second polypeptide has a structure represented by VH3-L4-VL3. In some aspects, the first polypeptide has a structure represented by VL1-L1-VL2-L2-VH2-L3-VH1 and the second polypeptide has a structure represented by VL3-VH3. In some aspects, the first polypeptide has a structure represented by VL1-L1-VL2-L2-VH2-L3-VH1 and the second polypeptide has a structure represented by VH3-VL3. In some aspects, the first polypeptide has a structure represented by VL1-L1-VL2-L2-VH2-L3-VH1 and the second polypeptide has a structure represented by VL3-L4-VH3. In some aspects, the first polypeptide has a structure represented by VL1-L1-VL2-L2-VH2-L3-VH1 and the second polypeptide has a structure represented by VH3-L4-VL3. In some aspects, the first polypeptide has a structure represented by VH1-L1-VH2-L2-VL2-L3-VL1 and the second polypeptide has a structure represented by VL3-VH3. In some aspects, the first polypeptide has a structure represented by VH1-L1-VH2-L2-VL2-L3-VL1 and the second polypeptide has a structure represented by VH3-VL3. In some aspects, the first polypeptide has a structure represented by VH1-L1-VH2-L2-VL2-L3-VL1 and the second polypeptide has a structure represented by VL3-L4-VH3. In some aspects, the first polypeptide has a structure represented by VH1-L1-VH2-L2-VL2-L3-VL1 and the second polypeptide has a structure represented by VH3-L4-VL3.

[0123] In other aspects, the invention is directed to an antigen binding polypeptide complex comprising a first polypeptide and a second polypeptide; wherein the first polypeptide has a structure represented by VL1-VL2-VH2-VH1-Fc; VH1-VH2-VL2-VL1-Fc; VL1-L1-VL2-L2-VH2-L3-VH1-Fc; VH1-L1-VH2-L2-VL2-L3-VL1-Fc; VL1-L1-VL2-L2-VH2-L3-VH1-L4-Fc; or VH1-L1-VH2-L2-VL2-L3-VL1-L4-Fc; wherein the second polypeptide has a structure represented by VL3-VH3-Fc; VH3-VL3-Fc; VL3-L5-VH3-Fc; or VH3-L5-VL3-Fc; wherein VL1 is a first immunoglobulin light chain variable region; VL2 is a second immunoglobulin light chain variable region; VL3 is a third immunoglobulin light chain variable region; VH1 is a first immunoglobulin heavy chain variable region; VH2 is a second immunoglobulin heavy chain variable region; VH3 is a third immunoglobulin heavy chain variable region; Fc is a region comprising an immunoglobulin heavy chain constant region 2 (CH2), an immunoglobulin heavy chain constant region 3 (CH3), and optionally, an immunoglobulin hinge; and L1, L2, L3, L4 and L5 are amino acid linkers. In some aspects, the first polypeptide has a structure represented by VL1-VL2-VH2-VH1-Fc and the second polypeptide has a structure represented by VL3-VH3-Fc. In some aspects, the first polypeptide has a structure represented by VL1-VL2-VH2-VH1-Fc and the second polypeptide has a structure represented by VH3-VL3-Fc. In some aspects, the first polypeptide has a structure represented by VL1-VL2-VH2-VH1-Fc and the second polypeptide has a structure represented by VL3-L5-VH3-Fc. In some aspects, the first polypeptide has a structure represented by VL1-VL2-VH2-VH1-Fc and the second polypeptide has a structure represented by VH3-L5-VL3-Fc. In some aspects, the first polypeptide has a structure represented by VH1-VH2-VL2-VL1-Fc and the second polypeptide has a structure represented by VL3-VH3-Fc. In some aspects, the first polypeptide has a structure represented by VH1-VH2-VL2-VL1-Fc and the second polypeptide has a structure represented by VH3-VL3-Fc. In some aspects, the first polypeptide has a structure represented by VH1-VH2-VL2-VL1-Fc and the second polypeptide has a structure represented by VL3-L5-VH3-Fc. In some aspects, the first polypeptide has a structure represented by VH1-VH2-VL2-VL1-Fc and the second polypeptide has a structure represented by VH3-L5-VL3-Fc. In some aspects, the first polypeptide has a structure represented by VL1-L1-VL2-L2-VH2-L3-VH1-Fc and the second polypeptide has a structure represented by VL3-VH3-Fc. In some aspects, the first polypeptide has a structure represented by VL1-L1-VL2-L2-VH2-L3-VH1-Fc and the second polypeptide has a structure represented by VH3-VL3-Fc. In some aspects, the first polypeptide has a structure represented by VL1-L1-VL2-L2-VH2-L3-VH1-Fc and the second polypeptide has a structure represented by VL3-L5-VH3-Fc. In some aspects, the first polypeptide has a structure represented by VL1-L1-VL2-L2-VH2-L3-VH1-Fc and the second polypeptide has a structure represented by VH3-L5-VL3-Fc. In some aspects, the first polypeptide has a structure represented by VH1-L1-VH2-L2-VL2-L3-VL1-Fc and the second polypeptide has a structure represented by VL3-VH3-Fc. In some aspects, the first polypeptide has a structure represented by VH1-L1-VH2-L2-VL2-L3-VL1-Fc and the second polypeptide has a structure represented by VH3-VL3-Fc. In some aspects, the first polypeptide has a structure represented by VH1-L1-VH2-L2-VL2-L3-VL1-Fc and the second polypeptide has a structure represented by VL3-L5-VH3-Fc. In some aspects, the first polypeptide has a structure represented by VH1-L1-VH2-L2-VL2-L3-VL1-Fc and the second polypeptide has a structure represented by VH3-L5-VL3-Fc. In some aspects, the first polypeptide has a structure represented by VL1-L1-VL2-L2-VH2-L3-VH1-L4-Fc and the second polypeptide has a structure represented by VL3-VH3-Fc. In some aspects, the first polypeptide has a structure represented by VL1-L1-VL2-L2-VH2-L3-VH1-L4-Fc and the second polypeptide has a structure represented by VH3-VL3-Fc. In some aspects, the first polypeptide has a structure represented by VL1-L1-VL2-L2-VH2-L3-VH1-L4-Fc and the second polypeptide has a structure represented by VL3-L5-VH3-Fc. In some aspects, the first polypeptide has a structure represented by VL1-L1-VL2-L2-VH2-L3-VH1-L4-Fc and the second polypeptide has a structure represented by VH3-L5-VL3-Fc. In some aspects, the first polypeptide has a structure represented by VH1-L1-VH2-L2-VL2-L3-VL1-L4-Fc and the second polypeptide has a structure represented by VL3-VH3-Fc. In some aspects, the first polypeptide has a structure represented by VH1-L1-VH2-L2-VL2-L3-VL1-L4-Fc and the second polypeptide has a structure represented by VH3-VL3-Fc. In some aspects, the first polypeptide has a structure represented by VH1-L1-VH2-L2-VL2-L3-VL1-L4-Fc and the second polypeptide has a structure represented by VL3-L5-VH3-Fc. In some aspects, the first polypeptide has a structure represented by VH1-L1-VH2-L2-VL2-L3-VL1-L4-Fc and the second polypeptide has a structure represented by VH3-L5-VL3-Fc.

[0124] In other aspects, the invention is directed to an antigen binding polypeptide complex comprising a first polypeptide and a second polypeptide; wherein the first polypeptide has a structure represented by VL1-VL2-VH2-VH1-CH1; VH1-VH2-VL2-VL1-CH1; VL1-VL2-VH2-VH1-CL; VH1-VH2-VL2-VL1-CL; VL1-VL2-VH2-VH1-CH1-CL; VH1-VH2-VL2-VL1-CH1-CL; VL1-VL2-VH2-VH1-CL-CH1; VH1-VH2-VL2-VL1-CL-CH1; VL1-L1-VL2-L2-VH2-L3-VH1-L4-CH1; VH1-L1-VH2-L2-VL2-L3-VL1-L4-CH1; VL1-L1-VL2-L2-VH2-L3-VH1-L4-CL; VH1-L1-VH2-L2-VL2-L3-VL1-L4-CL; VL1-L1-VL2-L2-VH2-L3-VH1-L4-CH1-L5-CL; VH1-L1-VH2-L2-VL2-L3-VL1-L4-CH1-L5-CL; VL1-L1-VL2-L2-VH2-L3-VH1-L4-CL-L5-CH1; or VH1-L1-VH2-L2-VL2-L3-VL1-L4-CL-L5-CH1; wherein the second polypeptide has a structure represented by VL3-VH3-CH1; VH3-VL3-CH1; VL3-VH3-CL; VH3-VL3-CL; VL3-VH3-CH1-CL; VH3-VL3-CH1-CL; VL3-VH3-CL-CH1; VH3-VL3-CL-CH1; VL3-CL-VH3-CH1; VL3-CH1-VH3-CL; VH3-CH1-VL3-CL; VH3-CL-VL3-CH1; VL3-L6-VH3-L7-CH1; VH3-L6-VL3-L7-CH1; VL3-L6-VH3-L7-CL; VH3-L6-VL3-L7-CL; VL3-L6-VH3-L7-CH1-L8-CL; VH3-L6-VL3-L7-CH1-L8-CL; VL3-L6-VH3-L7-CL-L8-CH1; VH3-L6-VL3-L7-CL-L8-CH1; VL3-L6-CL-L7-VH3-L8-CH1; VL3-L6-CH1-L7-VH3-L8-CL; VH3-L6-CH1-L7-VL3-L8-CL; VH3-L6-CL-L7-VL3-L8-CH1; VL3-VH3-L6-CH1-CL; VH3-VL3-L6-CH1-CL; VL3-VH3-L6-CL-CH1; VH3-VL3-L6-CL-CH1; VL3-CL-L6-VH3-CH1; VL3-CH1-L6-VH3-CL; VH3-CH1-L6-VL3-CL; or VH3-CL-L6-VL3-CH1; wherein VL1 is a first immunoglobulin light chain variable region; VL2 is a second immunoglobulin light chain variable region; VL3 is a third immunoglobulin light chain variable region; VH1 is a first immunoglobulin heavy chain variable region; VH2 is a second immunoglobulin heavy chain variable region; VH3 is a third immunoglobulin heavy chain variable region; CH1 is an immunoglobulin heavy chain constant region 1; CL is an immunoglobulin light chain constant region; and L1, L2, L3, L4, L5, L6, L7 and L8 are amino acid linkers. In some aspects, the first polypeptide has a structure represented by VL1-VL2-VH2-VH1-CH1 and the second polypeptide has a structure represented by VL3-VH3-CH1; VH3-VL3-CH1; VL3-VH3-CL; VH3-VL3-CL; VL3-VH3-CH1-CL; VH3-VL3-CH1-CL; VL3-VH3-CL-CH1; VH3-VL3-CL-CH1; VL3-CL-VH3-CH1; VL3-CH1-VH3-CL; VH3-CH1-VL3-CL; VH3-CL-VL3-CH1; VL3-L6-VH3-L7-CH1; VH3-L6-VL3-L7-CH1; VL3-L6-VH3-L7-CL; VH3-L6-VL3-L7-CL; VL3-L6-VH3-L7-CH1-L8-CL; VH3-L6-VL3-L7-CH1-L8-CL; VL3-L6-VH3-L7-CL-L8-CH1; VH3-L6-VL3-L7-CL-L8-CH1; VL3-L6-CL-L7-VH3-L8-CH1; VL3-L6-CH1-L7-VH3-L8-CL; VH3-L6-CH1-L7-VL3-L8-CL; VH3-L6-CL-L7-VL3-L8-CH1; VL3-VH3-L6-CH1-CL; VH3-VL3-L6-CH1-CL; VL3-VH3-L6-CL-CH1; VH3-VL3-L6-CL-CH1; VL3-CL-L6-VH3-CH1; VL3-CH1-L6-VH3-CL; VH3-CH1-L6-VL3-CL; or VH3-CL-L6-VL3-CH1. In some aspects, the first polypeptide has a structure represented by VH1-VH2-VL2-VL1-CH1 and the second polypeptide has a structure represented by VL3-VH3-CH1; VH3-VL3-CH1; VL3-VH3-CL; VH3-VL3-CL; VL3-VH3-CH1-CL; VH3-VL3-CH1-CL; VL3-VH3-CL-CH1; VH3-VL3-CL-CH1; VL3-CL-VH3-CH1; VL3-CH1-VH3-CL; VH3-CH1-VL3-CL; VH3-CL-VL3-CH1; VL3-L6-VH3-L7-CH1; VH3-L6-VL3-L7-CH1; VL3-L6-VH3-L7-CL; VH3-L6-VL3-L7-CL; VL3-L6-VH3-L7-CH1-L8-CL; VH3-L6-VL3-L7-CH1-L8-CL; VL3-L6-VH3-L7-CL-L8-CH1; VH3-L6-VL3-L7-CL-L8-CH1; VL3-L6-CL-L7-VH3-L8-CH1; VL3-L6-CH1-L7-VH3-L8-CL; VH3-L6-CH1-L7-VL3-L8-CL; VH3-L6-CL-L7-VL3-L8-CH1; VL3-VH3-L6-CH1-CL; VH3-VL3-L6-CH1-CL; VL3-VH3-L6-CL-CH1; VH3-VL3-L6-CL-CH1; VL3-CL-L6-VH3-CH1; VL3-CH1-L6-VH3-CL; VH3-CH1-L6-VL3-CL; or VH3-CL-L6-VL3-CH1. In some aspects, the first polypeptide has a structure represented by VL1-VL2-VH2-VH1-CL and the second polypeptide has a structure represented by VL3-VH3-CH1; VH3-VL3-CH1; VL3-VH3-CL; VH3-VL3-CL; VL3-VH3-CH1-CL; VH3-VL3-CH1-CL; VL3-VH3-CL-CH1; VH3-VL3-CL-CH1; VL3-CL-VH3-CH1; VL3-CH1-VH3-CL; VH3-CH1-VL3-CL; VH3-CL-VL3-CH1; VL3-L6-VH3-L7-CH1; VH3-L6-VL3-L7-CH1; VL3-L6-VH3-L7-CL; VH3-L6-VL3-L7-CL; VL3-L6-VH3-L7-CH1-L8-CL; VH3-L6-VL3-L7-CH1-L8-CL; VL3-L6-VH3-L7-CL-L8-CH1; VH3-L6-VL3-L7-CL-L8-CH1; VL3-L6-CL-L7-VH3-L8-CH1; VL3-L6-CH1-L7-VH3-L8-CL; VH3-L6-CH1-L7-VL3-L8-CL; VH3-L6-CL-L7-VL3-L8-CH1; VL3-VH3-L6-CH1-CL; VH3-VL3-L6-CH1-CL; VL3-VH3-L6-CL-CH1; VH3-VL3-L6-CL-CH1; VL3-CL-L6-VH3-CH1; VL3-CH1-L6-VH3-CL; VH3-CH1-L6-VL3-CL; or VH3-CL-L6-VL3-CH1. In some aspects, the first polypeptide has a structure represented by VH1-VH2-VL2-VL1-CL and the second polypeptide has a structure represented by VL3-VH3-CH1; VH3-VL3-CH1; VL3-VH3-CL; VH3-VL3-CL; VL3-VH3-CH1-CL; VH3-VL3-CH1-CL; VL3-VH3-CL-CH1; VH3-VL3-CL-CH1; VL3-CL-VH3-CH1; VL3-CH1-VH3-CL; VH3-CH1-VL3-CL; VH3-CL-VL3-CH1; VL3-L6-VH3-L7-CH1; VH3-L6-VL3-L7-CH1; VL3-L6-VH3-L7-CL; VH3-L6-VL3-L7-CL; VL3-L6-VH3-L7-CH1-L8-CL; VH3-L6-VL3-L7-CH1-L8-CL; VL3-L6-VH3-L7-CL-L8-CH1; VH3-L6-VL3-L7-CL-L8-CH1; VL3-L6-CL-L7-VH3-L8-CH1; VL3-L6-CH1-L7-VH3-L8-CL; VH3-L6-CH1-L7-VL3-L8-CL; VH3-L6-CL-L7-VL3-L8-CH1; VL3-VH3-L6-CH1-CL; VH3-VL3-L6-CH1-CL; VL3-VH3-L6-CL-CH1; VH3-VL3-L6-CL-CH1; VL3-CL-L6-VH3-CH1; VL3-CH1-L6-VH3-CL; VH3-CH1-L6-VL3-CL; or VH3-CL-L6-VL3-CH1. In some aspects, the first polypeptide has a structure represented by VL1-VL2-VH2-VH1-CH1-CL and the second polypeptide has a structure represented by VL3-VH3-CH1; VH3-VL3-CH1; VL3-VH3-CL; VH3-VL3-CL; VL3-VH3-CH1-CL; VH3-VL3-CH1-CL; VL3-VH3-CL-CH1; VH3-VL3-CL-CH1; VL3-CL-VH3-CH1; VL3-CH1-VH3-CL; VH3-CH1-VL3-CL; VH3-CL-VL3-CH1; VL3-L6-VH3-L7-CH1; VH3-L6-VL3-L7-CH1; VL3-L6-VH3-L7-CL; VH3-L6-VL3-L7-CL; VL3-L6-VH3-L7-CH1-L8-CL; VH3-L6-VL3-L7-CH1-L8-CL; VL3-L6-VH3-L7-CL-L8-CH1; VH3-L6-VL3-L7-CL-L8-CH1; VL3-L6-CL-L7-VH3-L8-CH1; VL3-L6-CH1-L7-VH3-L8-CL; VH3-L6-CH1-L7-VL3-L8-CL; VH3-L6-CL-L7-VL3-L8-CH1; VL3-VH3-L6-CH1-CL; VH3-VL3-L6-CH1-CL; VL3-VH3-L6-CL-CH1; VH3-VL3-L6-CL-CH1; VL3-CL-L6-VH3-CH1; VL3-CH1-L6-VH3-CL; VH3-CH1-L6-VL3-CL; or VH3-CL-L6-VL3-CH1. In some aspects, the first polypeptide has a structure represented by VH1-VH2-VL2-VL1-CH1-CL and the second polypeptide has a structure represented by VL3-VH3-CH1; VH3-VL3-CH1; VL3-VH3-CL; VH3-VL3-CL; VL3-VH3-CH1-CL; VH3-VL3-CH1-CL; VL3-VH3-CL-CH1; VH3-VL3-CL-CH1; VL3-CL-VH3-CH1; VL3-CH1-VH3-CL; VH3-CH1-VL3-CL; VH3-CL-VL3-CH1; VL3-L6-VH3-L7-CH1; VH3-L6-VL3-L7-CH1; VL3-L6-VH3-L7-CL; VH3-L6-VL3-L7-CL; VL3-L6-VH3-L7-CH1-L8-CL; VH3-L6-VL3-L7-CH1-L8-CL; VL3-L6-VH3-L7-CL-L8-CH1; VH3-L6-VL3-L7-CL-L8-CH1; VL3-L6-CL-L7-VH3-L8-CH1; VL3-L6-CH1-L7-VH3-L8-CL; VH3-L6-CH1-L7-VL3-L8-CL; VH3-L6-CL-L7-VL3-L8-CH1; VL3-VH3-L6-CH1-CL; VH3-VL3-L6-CH1-CL; VL3-VH3-L6-CL-CH1; VH3-VL3-L6-CL-CH1; VL3-CL-L6-VH3-CH1; VL3-CH1-L6-VH3-CL; VH3-CH1-L6-VL3-CL; or VH3-CL-L6-VL3-CH1. In some aspects, the first polypeptide has a structure represented by VL1-VL2-VH2-VH1-CL-CH1 and the second polypeptide has a structure represented by VL3-VH3-CH1; VH3-VL3-CH1; VL3-VH3-CL; VH3-VL3-CL; VL3-VH3-CH1-CL; VH3-VL3-CH1-CL; VL3-VH3-CL-CH1; VH3-VL3-CL-CH1; VL3-CL-VH3-CH1; VL3-CH1-VH3-CL; VH3-CH1-VL3-CL; VH3-CL-VL3-CH1; VL3-L6-VH3-L7-CH1; VH3-L6-VL3-L7-CH1; VL3-L6-VH3-L7-CL; VH3-L6-VL3-L7-CL; VL3-L6-VH3-L7-CH1-L8-CL; VH3-L6-VL3-L7-CH1-L8-CL; VL3-L6-VH3-L7-CL-L8-CH1; VH3-L6-VL3-L7-CL-L8-CH1; VL3-L6-CL-L7-VH3-L8-CH1; VL3-L6-CH1-L7-VH3-L8-CL; VH3-L6-CH1-L7-VL3-L8-CL; VH3-L6-CL-L7-VL3-L8-CH1; VL3-VH3-L6-CH1-CL; VH3-VL3-L6-CH1-CL; VL3-VH3-L6-CL-CH1; VH3-VL3-L6-CL-CH1; VL3-CL-L6-VH3-CH1; VL3-CH1-L6-VH3-CL; VH3-CH1-L6-VL3-CL; or VH3-CL-L6-VL3-CH1. In some aspects, the first polypeptide has a structure represented by VH1-VH2-VL2-VL1-CL-CH1 and the second polypeptide has a structure represented by VL3-VH3-CH1; VH3-VL3-CH1; VL3-VH3-CL; VH3-VL3-CL; VL3-VH3-CH1-CL; VH3-VL3-CH1-CL; VL3-VH3-CL-CH1; VH3-VL3-CL-CH1; VL3-CL-VH3-CH1; VL3-CH1-VH3-CL; VH3-CH1-VL3-CL; VH3-CL-VL3-CH1; VL3-L6-VH3-L7-CH1; VH3-L6-VL3-L7-CH1; VL3-L6-VH3-L7-CL; VH3-L6-VL3-L7-CL; VL3-L6-VH3-L7-CH1-L8-CL; VH3-L6-VL3-L7-CH1-L8-CL; VL3-L6-VH3-L7-CL-L8-CH1; VH3-L6-VL3-L7-CL-L8-CH1; VL3-L6-CL-L7-VH3-L8-CH1; VL3-L6-CH1-L7-VH3-L8-CL; VH3-L6-CH1-L7-VL3-L8-CL; VH3-L6-CL-L7-VL3-L8-CH1; VL3-VH3-L6-CH1-CL; VH3-VL3-L6-CH1-CL; VL3-VH3-L6-CL-CH1; VH3-VL3-L6-CL-CH1; VL3-CL-L6-VH3-CH1; VL3-CH1-L6-VH3-CL; VH3-CH1-L6-VL3-CL; or VH3-CL-L6-VL3-CH1. In some aspects, the first polypeptide has a structure represented by VL1-L1-VL2-L2-VH2-L3-VH1-L4-CH1 and the second polypeptide has a structure represented by VL3-VH3-CH1; VH3-VL3-CH1; VL3-VH3-CL; VH3-VL3-CL; VL3-VH3-CH1-CL; VH3-VL3-CH1-CL; VL3-VH3-CL-CH1; VH3-VL3-CL-CH1; VL3-CL-VH3-CH1; VL3-CH1-VH3-CL; VH3-CH1-VL3-CL; VH3-CL-VL3-CH1; VL3-L6-VH3-L7-CH1; VH3-L6-VL3-L7-CH1; VL3-L6-VH3-L7-CL; VH3-L6-VL3-L7-CL; VL3-L6-VH3-L7-CH1-L8-CL; VH3-L6-VL3-L7-CH1-L8-CL; VL3-L6-VH3-L7-CL-L8-CH1; VH3-L6-VL3-L7-CL-L8-CH1; VL3-L6-CL-L7-VH3-L8-CH1; VL3-L6-CH1-L7-VH3-L8-CL; VH3-L6-CH1-L7-VL3-L8-CL; VH3-L6-CL-L7-VL3-L8-CH1; VL3-VH3-L6-CH1-CL; VH3-VL3-L6-CH1-CL; VL3-VH3-L6-CL-CH1; VH3-VL3-L6-CL-CH1; VL3-CL-L6-VH3-CH1; VL3-CH1-L6-VH3-CL; VH3-CH1-L6-VL3-CL; or VH3-CL-L6-VL3-CH1. In some aspects, the first polypeptide has a structure represented by VH1-L1-VH2-L2-VL2-L3-VL1-L4-CH1 and the second polypeptide has a structure represented by VL3-VH3-CH1; VH3-VL3-CH1; VL3-VH3-CL; VH3-VL3-CL; VL3-VH3-CH1-CL; VH3-VL3-CH1-CL; VL3-VH3-CL-CH1; VH3-VL3-CL-CH1; VL3-CL-VH3-CH1; VL3-CH1-VH3-CL; VH3-CH1-VL3-CL; VH3-CL-VL3-CH1; VL3-L6-VH3-L7-CH1; VH3-L6-VL3-L7-CH1; VL3-L6-VH3-L7-CL; VH3-L6-VL3-L7-CL; VL3-L6-VH3-L7-CH1-L8-CL; VH3-L6-VL3-L7-CH1-L8-CL; VL3-L6-VH3-L7-CL-L8-CH1; VH3-L6-VL3-L7-CL-L8-CH1; VL3-L6-CL-L7-VH3-L8-CH1; VL3-L6-CH1-L7-VH3-L8-CL; VH3-L6-CH1-L7-VL3-L8-CL; VH3-L6-CL-L7-VL3-L8-CH1; VL3-VH3-L6-CH1-CL; VH3-VL3-L6-CH1-CL; VL3-VH3-L6-CL-CH1; VH3-VL3-L6-CL-CH1; VL3-CL-L6-VH3-CH1; VL3-CH1-L6-VH3-CL; VH3-CH1-L6-VL3-CL; or VH3-CL-L6-VL3-CH1. In some aspects, the first polypeptide has a structure represented by VL1-L1-VL2-L2-VH2-L3-VH1-L4-CL and the second polypeptide has a structure represented by VL3-VH3-CH1; VH3-VL3-CH1; VL3-VH3-CL; VH3-VL3-CL; VL3-VH3-CH1-CL; VH3-VL3-CH1-CL; VL3-VH3-CL-CH1; VH3-VL3-CL-CH1; VL3-CL-VH3-CH1; VL3-CH1-VH3-CL; VH3-CH1-VL3-CL; VH3-CL-VL3-CH1; VL3-L6-VH3-L7-CH1; VH3-L6-VL3-L7-CH1; VL3-L6-VH3-L7-CL; VH3-L6-VL3-L7-CL; VL3-L6-VH3-L7-CH1-L8-CL; VH3-L6-VL3-L7-CH1-L8-CL; VL3-L6-VH3-L7-CL-L8-CH1; VH3-L6-VL3-L7-CL-L8-CH1; VL3-L6-CL-L7-VH3-L8-CH1; VL3-L6-CH1-L7-VH3-L8-CL; VH3-L6-CH1-L7-VL3-L8-CL; VH3-L6-CL-L7-VL3-L8-CH1; VL3-VH3-L6-CH1-CL; VH3-VL3-L6-CH1-CL; VL3-VH3-L6-CL-CH1; VH3-VL3-L6-CL-CH1; VL3-CL-L6-VH3-CH1; VL3-CH1-L6-VH3-CL; VH3-CH1-L6-VL3-CL; or VH3-CL-L6-VL3-CH1. In some aspects, the first polypeptide has a structure represented by VH1-L1-VH2-L2-VL2-L3-VL1-L4-CL and the second polypeptide has a structure represented by VL3-VH3-CH1; VH3-VL3-CH1; VL3-VH3-CL; VH3-VL3-CL; VL3-VH3-CH1-CL; VH3-VL3-CH1-CL; VL3-VH3-CL-CH1; VH3-VL3-CL-CH1; VL3-CL-VH3-CH1; VL3-CH1-VH3-CL; VH3-CH1-VL3-CL; VH3-CL-VL3-CH1; VL3-L6-VH3-L7-CH1; VH3-L6-VL3-L7-CH1; VL3-L6-VH3-L7-CL; VH3-L6-VL3-L7-CL; VL3-L6-VH3-L7-CH1-L8-CL; VH3-L6-VL3-L7-CH1-L8-CL; VL3-L6-VH3-L7-CL-L8-CH1; VH3-L6-VL3-L7-CL-L8-CH1; VL3-L6-CL-L7-VH3-L8-CH1; VL3-L6-CH1-L7-VH3-L8-CL; VH3-L6-CH1-L7-VL3-L8-CL; VH3-L6-CL-L7-VL3-L8-CH1; VL3-VH3-L6-CH1-CL; VH3-VL3-L6-CH1-CL; VL3-VH3-L6-CL-CH1; VH3-VL3-L6-CL-CH1; VL3-CL-L6-VH3-CH1; VL3-CH1-L6-VH3-CL; VH3-CH1-L6-VL3-CL; or VH3-CL-L6-VL3-CH1. In some aspects, the first polypeptide has a structure represented by VL1-L1-VL2-L2-VH2-L3-VH1-L4-CH1-L5-CL and the second polypeptide has a structure represented by VL3-VH3-CH1; VH3-VL3-CH1; VL3-VH3-CL; VH3-VL3-CL; VL3-VH3-CH1-CL; VH3-VL3-CH1-CL; VL3-VH3-CL-CH1; VH3-VL3-CL-CH1; VL3-CL-VH3-CH1; VL3-CH1-VH3-CL; VH3-CH1-VL3-CL; VH3-CL-VL3-CH1; VL3-L6-VH3-L7-CH1; VH3-L6-VL3-L7-CH1; VL3-L6-VH3-L7-CL; VH3-L6-VL3-L7-CL; VL3-L6-VH3-L7-CH1-L8-CL; VH3-L6-VL3-L7-CH1-L8-CL; VL3-L6-VH3-L7-CL-L8-CH1; VH3-L6-VL3-L7-CL-L8-CH1; VL3-L6-CL-L7-VH3-L8-CH1; VL3-L6-CH1-L7-VH3-L8-CL; VH3-L6-CH1-L7-VL3-L8-CL; VH3-L6-CL-L7-VL3-L8-CH1; VL3-VH3-L6-CH1-CL; VH3-VL3-L6-CH1-CL; VL3-VH3-L6-CL-CH1; VH3-VL3-L6-CL-CH1; VL3-CL-L6-VH3-CH1; VL3-CH1-L6-VH3-CL; VH3-CH1-L6-VL3-CL; or VH3-CL-L6-VL3-CH1. In some aspects, the first polypeptide has a structure represented by VH1-L1-VH2-L2-VL2-L3-VL1-L4-CH1-L5-CL and the second polypeptide has a structure represented by VL3-VH3-CH1; VH3-VL3-CH1; VL3-VH3-CL; VH3-VL3-CL; VL3-VH3-CH1-CL; VH3-VL3-CH1-CL; VL3-VH3-CL-CH1; VH3-VL3-CL-CH1; VL3-CL-VH3-CH1; VL3-CH1-VH3-CL; VH3-CH1-VL3-CL; VH3-CL-VL3-CH1; VL3-L6-VH3-L7-CH1; VH3-L6-VL3-L7-CH1; VL3-L6-VH3-L7-CL; VH3-L6-VL3-L7-CL; VL3-L6-VH3-L7-CH1-L8-CL; VH3-L6-VL3-L7-CH1-L8-CL; VL3-L6-VH3-L7-CL-L8-CH1; VH3-L6-VL3-L7-CL-L8-CH1; VL3-L6-CL-L7-VH3-L8-CH1; VL3-L6-CH1-L7-VH3-L8-CL; VH3-L6-CH1-L7-VL3-L8-CL; VH3-L6-CL-L7-VL3-L8-CH1; VL3-VH3-L6-CH1-CL; VH3-VL3-L6-CH1-CL; VL3-VH3-L6-CL-CH1; VH3-VL3-L6-CL-CH1; VL3-CL-L6-VH3-CH1; VL3-CH1-L6-VH3-CL; VH3-CH1-L6-VL3-CL; or VH3-CL-L6-VL3-CH1. In some aspects, the first polypeptide has a structure represented by VL1-L1-VL2-L2-VH2-L3-VH1-L4-CL-L5-CH1 and the second polypeptide has a structure represented by VL3-VH3-CH1; VH3-VL3-CH1; VL3-VH3-CL; VH3-VL3-CL; VL3-VH3-CH1-CL; VH3-VL3-CH1-CL; VL3-VH3-CL-CH1; VH3-VL3-CL-CH1; VL3-CL-VH3-CH1; VL3-CH1-VH3-CL; VH3-CH1-VL3-CL; VH3-CL-VL3-CH1; VL3-L6-VH3-L7-CH1; VH3-L6-VL3-L7-CH1; VL3-L6-VH3-L7-CL; VH3-L6-VL3-L7-CL; VL3-L6-VH3-L7-CH1-L8-CL; VH3-L6-VL3-L7-CH1-L8-CL; VL3-L6-VH3-L7-CL-L8-CH1; VH3-L6-VL3-L7-CL-L8-CH1; VL3-L6-CL-L7-VH3-L8-CH1; VL3-L6-CH1-L7-VH3-L8-CL; VH3-L6-CH1-L7-VL3-L8-CL; VH3-L6-CL-L7-VL3-L8-CH1; VL3-VH3-L6-CH1-CL; VH3-VL3-L6-CH1-CL; VL3-VH3-L6-CL-CH1; VH3-VL3-L6-CL-CH1; VL3-CL-L6-VH3-CH1; VL3-CH1-L6-VH3-CL; VH3-CH1-L6-VL3-CL; or VH3-CL-L6-VL3-CH1. In some aspects, the first polypeptide has a structure represented by VH1-L1-VH2-L2-VL2-L3-VL1-L4-CL-L5-CH1 and the second polypeptide has a structure represented by VL3-VH3-CH1; VH3-VL3-CH1; VL3-VH3-CL; VH3-VL3-CL; VL3-VH3-CH1-CL; VH3-VL3-CH1-CL; VL3-VH3-CL-CH1; VH3-VL3-CL-CH1; VL3-CL-VH3-CH1; VL3-CH1-VH3-CL; VH3-CH1-VL3-CL; VH3-CL-VL3-CH1; VL3-L6-VH3-L7-CH1; VH3-L6-VL3-L7-CH1; VL3-L6-VH3-L7-CL; VH3-L6-VL3-L7-CL; VL3-L6-VH3-L7-CH1-L8-CL; VH3-L6-VL3-L7-CH1-L8-CL; VL3-L6-VH3-L7-CL-L8-CH1; VH3-L6-VL3-L7-CL-L8-CH1; VL3-L6-CL-L7-VH3-L8-CH1; VL3-L6-CH1-L7-VH3-L8-CL; VH3-L6-CH1-L7-VL3-L8-CL; VH3-L6-CL-L7-VL3-L8-CH1; VL3-VH3-L6-CH1-CL; VH3-VL3-L6-CH1-CL; VL3-VH3-L6-CL-CH1; VH3-VL3-L6-CL-CH1; VL3-CL-L6-VH3-CH1; VL3-CH1-L6-VH3-CL; VH3-CH1-L6-VL3-CL; or VH3-CL-L6-VL3-CH1.

[0125] In other aspects, the invention is directed to an antigen binding polypeptide complex comprising a first polypeptide and a second polypeptide; wherein the first polypeptide has a structure represented by VL1-VL2-VH2-VH1-CH1-Fc; VH1-VH2-VL2-VL1-CH1-Fc; VL1-VL2-VH2-VH1-CL-Fc; VH1-VH2-VL2-VL1-CL-Fc; VL1-VL2-VH2-VH1-CH1-CL-Fc; VH1-VH2-VL2-VL1-CH1-CL-Fc; VL1-VL2-VH2-VH1-CL-CH1-Fc; VH1-VH2-VL2-VL1-CL-CH1-Fc; VL1-L1-VL2-L2-VH2-L3-VH1-L4-CH1-Fc; VH1-L1-VH2-L2-VL2-L3-VL1-L4-CH1-Fc; VL1-L1-VL2-L2-VH2-L3-VH1-L4-CL-Fc; VH1-L1-VH2-L2-VL2-L3-VL1-L4-CL-Fc; VL1-L1-VL2-L2-VH2-L3-VH1-L4-CH1-L5-CL-Fe; VH1-L1-VH2-L2-VL2-L3-VL1-L4-CH1-L5-CL-Fc; VL1-L1-VL2-L2-VH2-L3-VH1-L4-CL-L5-CH1-Fc; or VH1-L1-VH2-L2-VL2-L3-VL1-L4-CL-L5-CH1-Fc; wherein the second polypeptide has a structure represented by VL3-VH3-CH1-Fc; VH3-VL3-CH1-Fc; VL3-VH3-CL-Fc; VH3-VL3-CL-Fc; VL3-VH3-CH1-CL-Fc; VH3-VL3-CH1-CL-Fc; VL3-VH3-CL-CH1-Fc; VH3-VL3-CL-CH1-Fc; VL3-CL-VH3-CH1-Fc; VL3-CH1-VH3-CL-Fc; VH3-CH1-VL3-CL-Fc; VH3-CL-VL3-CH1-Fc; VL3-L6-VH3-L7-CH1-Fc; VH3-L6-VL3-L7-CH1-Fc; VL3-L6-VH3-L7-CL-Fc; VH3-L6-VL3-L7-CL-Fc; VL3-L6-VH3-L7-CH1-L8-CL-Fc; VH3-L6-VL3-L7-CH1-L8-CL-Fc; VL3-L6-VH3-L7-CL-L8-CH1-Fc; VH3-L6-VL3-L7-CL-L8-CH1-Fc; VL3-L6-CL-L7-VH3-L8-CH1-Fc; VL3-L6-CH1-L7-VH3-L8-CL-Fc; VH13-L6-CH1-L7-VL3-L8-CL-Fc; VH3-L6-CL-L7-VL3-L8-CH1-Fc; VL3-VH3-L6-CH1-CL-Fc; VH3-VL3-L6-CH1-CL-Fc; VL3-VH3-L6-CL-CH1-Fc; VH3-VL3-L6-CL-CH1-Fc; VL3-CL-L6-VH3-CH1-Fc; VL3-CH1-L6-VH3-CL-Fc; VH3-CH1-L6-VL3-CL-Fc; or VH3-CL-L6-VL3-CH1-Fc; wherein VL1 is a first immunoglobulin light chain variable region; VL2 is a second immunoglobulin light chain variable region; VL3 is a third immunoglobulin light chain variable region; VH1 is a first immunoglobulin heavy chain variable region; VH2 is a second immunoglobulin heavy chain variable region; VH3 is a third immunoglobulin heavy chain variable region; Fc is a region comprising an immunoglobulin heavy chain constant region 2 (CH2), an immunoglobulin heavy chain constant region 3 (CH3), and optionally, an immunoglobulin hinge; CH1 is an immunoglobulin heavy chain constant region 1; CL is an immunoglobulin light chain constant region; and L1, L2, L3, L4, L5, L6, L7 and L8 are amino acid linkerIn some aspects, the first polypeptide has a structure represented by VL1-VL2-VH2-VH1-CH1-Fc and the second polypeptide has a structure represented by VL3-VH3-CH1-Fc; VH3-VL3-CH1-Fc; VL3-VH3-CL-Fc; VH3-VL3-CL-Fc; VL3-VH3-CH1-CL-Fc; VH3-VL3-CH1-CL-Fc; VL3-VH3-CL-CH1-Fc; VH3-VL3-CL-CH1-Fc; VL3-CL-VH3-CH1-Fc; VL3-CH1-VH3-CL-Fc; VH3-CH1-VL3-CL-Fc; VH3-CL-VL3-CH1-Fc; VL3-L6-VH3-L7-CH1-Fc; VH3-L6-VL3-L7-CH1-Fc; VL3-L6-VH3-L7-CL-Fc; VH3-L6-VL3-L7-CL-Fc; VL3-L6-VH3-L7-CH1-L8-CL-Fc; VH3-L6-VL3-L7-CH1-L8-CL-Fc; VL3-L6-VH3-L7-CL-L8-CH1-Fc; VH3-L6-VL3-L7-CL-L8-CH1-Fc; VL3-L6-CL-L7-VH3-L8-CH1-Fc; VL3-L6-CH1-L7-VH3-L8-CL-Fc; VH3-L6-CH1-L7-VL3-L8-CL-Fc; VH3-L6-CL-L7-VL3-L8-CH1-Fc; VL3-VH3-L6-CH1-CL-Fc; VH3-VL3-L6-CH1-CL-Fc; VL3-VH3-L6-CL-CH1-Fc; VH3-VL3-L6-CL-CH1-Fc; VL3-CL-L6-VH3-CH1-Fc; VL3-CH1-L6-VH3-CL-Fc; VH3-CH1-L6-VL3-CL-Fc; or VH3-CL-L6-VL3-CH1-Fe. In some aspects, the first polypeptide has a structure represented by VH1-VH2-VL2-VL1-CH1-Fc and the second polypeptide has a structure represented by VL3-VH3-CH1-Fc; VH3-VL3-CH1-Fc; VL3-VH3-CL-Fc; VH3-VL3-CL-Fc; VL3-VH3-CH1-CL-Fc; VH3-VL3-CH1-CL-Fc; VL3-VH3-CL-CH1-Fc; VH3-VL3-CL-CH1-Fc; VL3-CL-VH3-CH1-Fc; VL3-CH1-VH3-CL-Fc; VH3-CH1-VL3-CL-Fc; VH3-CL-VL3-CH1-Fe; VL3-L6-VH3-L7-CH1-Fc; VH3-L6-VL3-L7-CH1-Fc; VL3-L6-VH3-L7-CL-Fc; VH3-L6-VL3-L7-CL-Fc; VL3-L6-VH3-L7-CH1-L8-CL-Fc; VH3-L6-VL3-L7-CH1-L8-CL-Fc; VL3-L6-VH3-L7-CL-L8-CH1-Fc; VH3-L6-VL3-L7-CL-L8-CH1-Fc; VL3-L6-CL-L7-VH3-L8-CH1-Fc; VL3-L6-CH1-L7-VH3-L8-CL-Fc; VH3-L6-CH1-L7-VL3-L8-CL-Fc; VH3-L6-CL-L7-VL3-L8-CH1-Fc; VL3-VH3-L6-CH1-CL-Fc; VH3-VL3-L6-CH1-CL-Fc; VL3-VH3-L6-CL-CH1-Fc; VH3-VL3-L6-CL-CH1-Fc; VL3-CL-L6-VH3-CH1-Fc; VL3-CH1-L6-VH3-CL-Fc; VH3-CH1-L6-VL3-CL-Fc; or VH3-CL-L6-VL3-CH1-Fc. In some aspects, the first polypeptide has a structure represented by VL1-VL2-VH2-VH1-CL-Fc and the second polypeptide has a structure represented by VL3-VH3-CH1-Fc; VH3-VL3-CH1-Fc; VL3-VH3-CL-Fc; VH3-VL3-CL-Fc; VL3-VH3-CH1-CL-Fc; VH3-VL3-CH1-CL-Fc; VL3-VH3-CL-CH1-Fc; VH3-VL3-CL-CH1-Fc; VL3-CL-VH3-CH1-Fc; VL3-CH1-VH3-CL-Fc; VH3-CH1-VL3-CL-Fc; VH3-CL-VL3-CH1-Fc; VL3-L6-VH3-L7-CH1-Fc; VH3-L6-VL3-L7-CH1-Fc; VL3-L6-VH3-L7-CL-Fc; VH3-L6-VL3-L7-CL-Fc; VL3-L6-VH3-L7-CH1-L8-CL-Fc; VH3-L6-VL3-L7-CH1-L8-CL-Fc; VL3-L6-VH3-L7-CL-L8-CH1-Fc; VH3-L6-VL3-L7-CL-L8-CH1-Fc; VL3-L6-CL-L7-VH3-L8-CH1-Fc; VL3-L6-CH1-L7-VH3-L8-CL-Fc; VH3-L6-CH1-L7-VL3-L8-CL-Fc; VH3-L6-CL-L7-VL3-L8-CH1-Fc; VL3-VH3-L6-CH1-CL-Fc; VH3-VL3-L6-CH1-CL-Fc; VL3-VH3-L6-CL-CH1-Fc; VH3-VL3-L6-CL-CH1-Fc; VL3-CL-L6-VH3-CH1-Fc; VL3-CH1-L6-VH3-CL-Fc; VH3-CH1-L6-VL3-CL-Fc; or VH3-CL-L6-VL3-CH1-Fc. In some aspects, the first polypeptide has a structure represented by VH1-VH2-VL2-VL1-CL-Fc and the second polypeptide has a structure represented by VL3-VH3-CH1-Fc; VH3-VL3-CH1-Fc; VL3-VH3-CL-Fc; VH3-VL3-CL-Fc; VL3-VH3-CH1-CL-Fc; VH3-VL3-CH1-CL-Fc; VL3-VH3-CL-CH1-Fc; VH3-VL3-CL-CH1-Fc; VL3-CL-VH3-CH1-Fc; VL3-CH1-VH3-CL-Fc; VH3-CH1-VL3-CL-Fc; VH3-CL-VL3-CH1-Fc; VL3-L6-VH3-L7-CH1-Fc; VH3-L6-VL3-L7-CH1-Fc; VL3-L6-VH3-L7-CL-Fc; VH3-L6-VL3-L7-CL-Fc; VL3-L6-VH3-L7-CH1-L8-CL-Fc; VH3-L6-VL3-L7-CH1-L8-CL-Fc; VL3-L6-VH3-L7-CL-L8-CH1-Fc; VH3-L6-VL3-L7-CL-L8-CH1-Fc; VL3-L6-CL-L7-VH3-L8-CH1-Fc; VL3-L6-CH1-L7-VH3-L8-CL-Fc; VH3-L6-CH1-L7-VL3-L8-CL-Fc; VH3-L6-CL-L7-VL3-L8-CH1-Fc; VL3-VH3-L6-CH1-CL-Fc; VH3-VL3-L6-CH1-CL-Fc; VL3-VH3-L6-CL-CH1-Fc; VH3-VL3-L6-CL-CH1-Fc; VL3-CL-L6-VH3-CH1-Fc; VL3-CH1-L6-VH3-CL-Fc; VH3-CH1-L6-VL3-CL-Fc; or VH3-CL-L6-VL3-CH1-Fc. In some aspects, the first polypeptide has a structure represented by VL1-VL2-VH2-VH1-CH1-CL-Fc and the second polypeptide has a structure represented by VL3-VH3-CH1-Fc; VH3-VL3-CH1-Fc; VL3-VH3-CL-Fc; VH3-VL3-CL-Fc; VL3-VH3-CH1-CL-Fc; VH3-VL3-CH1-CL-Fc; VL3-VH3-CL-CH1-Fc; VH3-VL3-CL-CH1-Fc; VL3-CL-VH3-CH1-Fc; VL3-CH1-VH3-CL-Fc; VH3-CH1-VL3-CL-Fc; VH3-CL-VL3-CH1-Fc; VL3-L6-VH3-L7-CH1-Fc; VH3-L6-VL3-L7-CH1-Fc; VL3-L6-VH3-L7-CL-Fc; VH3-L6-VL3-L7-CL-Fc; VL3-L6-VH3-L7-CH1-L8-CL-Fc; VH3-L6-VL3-L7-CH1-L8-CL-Fe; VL3-L6-VH3-L7-CL-L8-CH1-Fc; VH3-L6-VL3-L7-CL-L8-CH1-Fc; VL3-L6-CL-L7-VH3-L8-CH1-Fc; VL3-L6-CH1-L7-VH3-L8-CL-Fc; VH3-L6-CH1-L7-VL3-L8-CL-Fc; VH3-L6-CL-L7-VL3-L8-CH1-Fc; VL3-VH3-L6-CH1-CL-Fe; VH3-VL3-L6-CH1-CL-Fc; VL3-VH3-L6-CL-CH1-Fc; VH3-VL3-L6-CL-CH1-Fc; VL3-CL-L6-VH3-CH1-Fc; VL3-CH1-L6-VH3-CL-Fc; VH3-CH1-L6-VL3-CL-Fc; or VH3-CL-L6-VL3-CH1-Fe. In some aspects, the first polypeptide has a structure represented by VH1-VH2-VL2-VL1-CH1-CL-Fc and the second polypeptide has a structure represented by VL3-VH3-CH1-Fc; VH3-VL3-CH1-Fc; VL3-VH3-CL-Fc; VH3-VL3-CL-Fc; VL3-VH3-CH1-CL-Fc; VH3-VL3-CH1-CL-Fc; VL3-VH3-CL-CH1-Fc; VH3-VL3-CL-CH1-Fc; VL3-CL-VH3-CH1-Fc; VL3-CH1-VH3-CL-Fe; VH3-CH1-VL3-CL-Fc; VH3-CL-VL3-CH1-Fc; VL3-L6-VH3-L7-CH1-Fc; VH3-L6-VL3-L7-CH1-Fc; VL3-L6-VH3-L7-CL-Fc; VH3-L6-VL3-L7-CL-Fc; VL3-L6-VH3-L7-CH1-L8-CL-Fc; VH3-L6-VL3-L7-CH1-L8-CL-Fc; VL3-L6-VH3-L7-CL-L8-CH1-Fc; VH3-L6-VL3-L7-CL-L8-CH1-Fc; VL3-L6-CL-L7-VH3-L8-CH1-Fc; VL3-L6-CH1-L7-VH3-L8-CL-Fc; VH3-L6-CH1-L7-VL3-L8-CL-Fc; VH3-L6-CL-L7-VL3-L8-CH1-Fc; VL3-VH3-L6-CH1-CL-Fc; VH3-VL3-L6-CH1-CL-Fc; VL3-VH3-L6-CL-CH1-Fc; VH3-VL3-L6-CL-CH1-Fc; VL3-CL-L6-VH3-CH1-Fc; VL3-CH1-L6-VH3-CL-Fc; VH3-CH1-L6-VL3-CL-Fc; or VH3-CL-L6-VL3-CH1-Fe. In some aspects, the first polypeptide has a structure represented by VL1-VL2-VH2-VH1-CL-CH1-Fc and the second polypeptide has a structure represented by VL3-VH3-CH1-Fc; VH3-VL3-CH1-Fc; VL3-VH3-CL-Fc; VH3-VL3-CL-Fc; VL3-VH3-CH1-CL-Fc; VH3-VL3-CH1-CL-Fc; VL3-VH3-CL-CH1-Fc; VH3-VL3-CL-CH1-Fc; VL3-CL-VH3-CH1-Fc; VL3-CH1-VH3-CL-Fc; VH3-CH1-VL3-CL-Fc; VH3-CL-VL3-CH1-Fc; VL3-L6-VH3-L7-CH1-Fc; VH3-L6-VL3-L7-CH1-Fc; VL3-L6-VH3-L7-CL-Fc; VH3-L6-VL3-L7-CL-Fc; VL3-L6-VH3-L7-CH1-L8-CL-Fc; VH3-L6-VL3-L7-CH1-L8-CL-Fc; VL3-L6-VH3-L7-CL-L8-CH1-Fc; VH3-L6-VL3-L7-CL-L8-CH1-Fc; VL3-L6-CL-L7-VH3-L8-CH1-Fc; VL3-L6-CH1-L7-VH3-L8-CL-Fc; VH3-L6-CH1-L7-VL3-L8-CL-Fc; VH3-L6-CL-L7-VL3-L8-CH1-Fc; VL3-VH3-L6-CH1-CL-Fc; VH3-VL3-L6-CH1-CL-Fc; VL3-VH3-L6-CL-CH1-Fc; VH3-VL3-L6-CL-CH1-Fc; VL3-CL-L6-VH3-CH1-Fc; VL3-CH1-L6-VH3-CL-Fc; VH3-CH1-L6-VL3-CL-Fc; or VH3-CL-L6-VL3-CH1-Fc. In some aspects, the first polypeptide has a structure represented by VH1-VH2-VL2-VL1-CL-CH1-Fc and the second polypeptide has a structure represented by VL3-VH3-CH1-Fc; VH3-VL3-CH1-Fc; VL3-VH3-CL-Fc; VH3-VL3-CL-Fc; VL3-VH3-CH1-CL-Fc; VH3-VL3-CH1-CL-Fc; VL3-VH3-CL-CH1-Fc; VH3-VL3-CL-CH1-Fc; VL3-CL-VH3-CH1-Fc; VL3-CH1-VH3-CL-Fc; VH3-CH1-VL3-CL-Fe; VH3-CL-VL3-CH1-Fc; VL3-L6-VH3-L7-CH1-Fc; VH3-L6-VL3-L7-CH1-Fc; VL3-L6-VH3-L7-CL-Fc; VH3-L6-VL3-L7-CL-Fc; VL3-L6-VH3-L7-CH1-L8-CL-Fc; VH3-L6-VL3-L7-CH1-L8-CL-Fc; VL3-L6-VH3-L7-CL-L8-CH1-Fe; VH3-L6-VL3-L7-CL-L8-CH1-Fc; VL3-L6-CL-L7-VH3-L8-CH1-Fc; VL3-L6-CH1-L7-VH3-L8-CL-Fc; VH3-L6-CH1-L7-VL3-L8-CL-Fc; VH3-L6-CL-L7-VL3-L8-CH1-Fc; VL3-VH3-L6-CH1-CL-Fc; VH3-VL3-L6-CH1-CL-Fc; VL3-VH3-L6-CL-CH1-Fc; VH3-VL3-L6-CL-CH1-Fc; VL3-CL-L6-VH3-CH1-Fc; VL3-CH1-L6-VH3-CL-Fc; VH3-CH1-L6-VL3-CL-Fc; or VH3-CL-L6-VL3-CH1-Fe. In some aspects, the first polypeptide has a structure represented by VL1-L1-VL2-L2-VH2-L3-VH1-L4-CH1-Fc and the second polypeptide has a structure represented by VL3-VH3-CH1-Fe; VH3-VL3-CH1-Fc; VL3-VH3-CL-Fc; VH3-VL3-CL-Fc; VL3-VH3-CH1-CL-Fc; VH3-VL3-CH1-CL-Fc; VL3-VH3-CL-CH1-Fc; VH3-VL3-CL-CH1-Fc; VL3-CL-VH3-CH1-Fc; VL3-CH1-VH3-CL-Fc; VH3-CH1-VL3-CL-Fc; VH3-CL-VL3-CH1-Fc; VL3-L6-VH3-L7-CH1-Fc; VH3-L6-VL3-L7-CH1-Fc; VL3-L6-VH3-L7-CL-Fc; VH3-L6-VL3-L7-CL-Fc; VL3-L6-VH3-L7-CH1-L8-CL-Fc; VH3-L6-VL3-L7-CH1-L8-CL-Fc; VL3-L6-VH3-L7-CL-L8-CH1-Fc; VH3-L6-VL3-L7-CL-L8-CH1-Fc; VL3-L6-CL-L7-VH3-L8-CH1-Fc; VL3-L6-CH1-L7-VH3-L8-CL-Fc; VH3-L6-CH1-L7-VL3-L8-CL-Fc; VH3-L6-CL-L7-VL3-L8-CH1-Fc; VL3-VH3-L6-CH1-CL-Fc; VH3-VL3-L6-CH1-CL-Fc; VL3-VH3-L6-CL-CH1-Fc; VH3-VL3-L6-CL-CH1-Fc; VL3-CL-L6-VH3-CH1-Fc; VL3-CH1-L6-VH3-CL-Fc; VH3-CH1-L6-VL3-CL-Fc; or VH3-CL-L6-VL3-CH1-Fc. In some aspects, the first polypeptide has a structure represented by VH1-L1-VH2-L2-VL2-L3-VL1-L4-CH1-Fc and the second polypeptide has a structure represented by VL3-VH3-CH1-Fc; VH3-VL3-CH1-Fc; VL3-VH3-CL-Fc; VH3-VL3-CL-Fc; VL3-VH3-CH1-CL-Fc; VH3-VL3-CH1-CL-Fc; VL3-VH3-CL-CH1-Fc; VH3-VL3-CL-CH1-Fc; VL3-CL-VH3-CH1-Fc; VL3-CH1-VH3-CL-Fc; VH3-CH1-VL3-CL-Fc; VH3-CL-VL3-CH1-Fc; VL3-L6-VH3-L7-CH1-Fc; VH3-L6-VL3-L7-CH1-Fc; VL3-L6-VH3-L7-CL-Fc; VH3-L6-VL3-L7-CL-Fe; VL3-L6-VH3-L7-CH1-L8-CL-Fc; VH3-L6-VL3-L7-CH1-L8-CL-Fc; VL3-L6-VH3-L7-CL-L8-CH1-Fc; VH3-L6-VL3-L7-CL-L8-CH1-Fc; VL3-L6-CL-L7-VH3-L8-CH1-Fc; VL3-L6-CH1-L7-VH3-L8-CL-Fc; VH3-L6-CH1-L7-VL3-L8-CL-Fc; VH3-L6-CL-L7-VL3-L8-CH1-Fc; VL3-VH3-L6-CH1-CL-Fc; VH3-VL3-L6-CH1-CL-Fc; VL3-VH3-L6-CL-CH1-Fc; VH3-VL3-L6-CL-CH1-Fc; VL3-CL-L6-VH3-CH1-Fc; VL3-CH1-L6-VH3-CL-Fc; VH3-CH1-L6-VL3-CL-Fc; or VH3-CL-L6-VL3-CH1-Fe. In some aspects, the first polypeptide has a structure represented by VL1-L1-VL2-L2-VH2-L3-VH1-L4-CL-Fc and the second polypeptide has a structure represented by VL3-VH3-CH1-Fc; VH3-VL3-CH1-Fc; VL3-VH3-CL-Fc; VH3-VL3-CL-Fc; VL3-VH3-CH1-CL-Fc; VH3-VL3-CH1-CL-Fc; VL3-VH3-CL-CH1-Fc; VH3-VL3-CL-CH1-Fc; VL3-CL-VH3-CH1-Fc; VL3-CH1-VH3-CL-Fc; VH3-CH1-VL3-CL-Fc; VH3-CL-VL3-CH1-Fe; VL3-L6-VH3-L7-CH1-Fc; VH3-L6-VL3-L7-CH1-Fc; VL3-L6-VH3-L7-CL-Fc; VH3-L6-VL3-L7-CL-Fc; VL3-L6-VH3-L7-CH1-L8-CL-Fc; VH3-L6-VL3-L7-CH1-L8-CL-Fc; VL3-L6-VH3-L7-CL-L8-CH1-Fc; VH3-L6-VL3-L7-CL-L8-CH1-Fc; VL3-L6-CL-L7-VH3-L8-CH1-Fc; VL3-L6-CH1-L7-VH3-L8-CL-Fc; VH3-L6-CH1-L7-VL3-L8-CL-Fc; VH3-L6-CL-L7-VL3-L8-CH1-Fc; VL3-VH3-L6-CH1-CL-Fc; VH3-VL3-L6-CH1-CL-Fc; VL3-VH3-L6-CL-CH1-Fc; VH3-VL3-L6-CL-CH1-Fc; VL3-CL-L6-VH3-CH1-Fc; VL3-CH1-L6-VH3-CL-Fc; VH3-CH1-L6-VL3-CL-Fc; or VH3-CL-L6-VL3-CH1-Fc. In some aspects, the first polypeptide has a structure represented by VH1-L1-VH2-L2-VL2-L3-VL1-L4-CL-Fc and the second polypeptide has a structure represented by VL3-VH3-CH1-Fc; VH3-VL3-CH1-Fc; VL3-VH3-CL-Fc; VH3-VL3-CL-Fc; VL3-VH3-CH1-CL-Fc; VH3-VL3-CH1-CL-Fc; VL3-VH3-CL-CH1-Fc; VH3-VL3-CL-CH1-Fc; VL3-CL-VH3-CH1-Fc; VL3-CH1-VH3-CL-Fc; VH3-CH1-VL3-CL-Fc; VH3-CL-VL3-CH1-Fc; VL3-L6-VH3-L7-CH1-Fc; VH3-L6-VL3-L7-CH1-Fc; VL3-L6-VH3-L7-CL-Fc; VH3-L6-VL3-L7-CL-Fc; VL3-L6-VH3-L7-CH1-L8-CL-Fc; VH3-L6-VL3-L7-CH1-L8-CL-Fc; VL3-L6-VH3-L7-CL-L8-CH1-Fc; VH3-L6-VL3-L7-CL-L8-CH1-Fe; VL3-L6-CL-L7-VH3-L8-CH1-Fc; VL3-L6-CH1-L7-VH3-L8-CL-Fc; VH3-L6-CH1-L7-VL3-L8-CL-Fc; VH3-L6-CL-L7-VL3-L8-CH1-Fc; VL3-VH3-L6-CH1-CL-Fc; VH3-VL3-L6-CH1-CL-Fc; VL3-VH3-L6-CL-CH1-Fc; VH3-VL3-L6-CL-CH1-Fc; VL3-CL-L6-VH3-CH1-Fc; VL3-CH1-L6-VH3-CL-Fc; VH3-CH1-L6-VL3-CL-Fc; or VH3-CL-L6-VL3-CH1-Fe. In some aspects, the first polypeptide has a structure represented by VL1-L1-VL2-L2-VH2-L3-VH1-L4-CH1-L5-CL-Fc and the second polypeptide has a structure represented by VL3-VH3-CH1-Fc; VH3-VL3-CH1-Fc; VL3-VH3-CL-Fc; VH3-VL3-CL-Fc; VL3-VH3-CH1-CL-Fc; VH3-VL3-CH1-CL-Fc; VL3-VH3-CL-CH1-Fc; VH3-VL3-CL-CH1-Fc; VL3-CL-VH3-CH1-Fc; VL3-CH1-VH3-CL-Fc; VH3-CH1-VL3-CL-Fc; VH3-CL-VL3-CH1-Fc; VL3-L6-VH3-L7-CH1-Fc; VH3-L6-VL3-L7-CH1-Fc; VL3-L6-VH3-L7-CL-Fc; VH3-L6-VL3-L7-CL-Fc; VL3-L6-VH3-L7-CH1-L8-CL-Fc; VH3-L6-VL3-L7-CH1-L8-CL-Fc; VL3-L6-VH3-L7-CL-L8-CH1-Fc; VH3-L6-VL3-L7-CL-L8-CH1-Fc; VL3-L6-CL-L7-VH3-L8-CH1-Fc; VL3-L6-CH1-L7-VH3-L8-CL-Fc; VH3-L6-CH1-L7-VL3-L8-CL-Fc; VH3-L6-CL-L7-VL3-L8-CH1-Fc; VL3-VH3-L6-CH1-CL-Fc; VH3-VL3-L6-CH1-CL-Fc; VL3-VH3-L6-CL-CH1-Fc; VH3-VL3-L6-CL-CH1-Fc; VL3-CL-L6-VH3-CH1-Fc; VL3-CH1-L6-VH3-CL-Fc; VH3-CH1-L6-VL3-CL-Fc; or VH3-CL-L6-VL3-CH1-Fc. In some aspects, the first polypeptide has a structure represented by VH1-L1-VH2-L2-VL2-L3-VL1-L4-CH1-L5-CL-Fc and the second polypeptide has a structure represented by VL3-VH3-CH1-Fc; VH3-VL3-CH1-Fe; VL3-VH3-CL-Fc; VH3-VL3-CL-Fc; VL3-VH3-CH1-CL-Fc; VH3-VL3-CH1-CL-Fc; VL3-VH3-CL-CH1-Fc; VH3-VL3-CL-CH1-Fc; VL3-CL-VH3-CH1-Fc; VL3-CH1-VH3-CL-Fc; VH3-CH1-VL3-CL-Fc; VH3-CL-VL3-CH1-Fc; VL3-L6-VH3-L7-CH1-Fc; VH3-L6-VL3-L7-CH1-Fc; VL3-L6-VH3-L7-CL-Fc; VH3-L6-VL3-L7-CL-Fc; VL3-L6-VH3-L7-CH1-L8-CL-Fc; VH3-L6-VL3-L7-CH1-L8-CL-Fc; VL3-L6-VH3-L7-CL-L8-CH1-Fc; VH3-L6-VL3-L7-CL-L8-CH1-Fc; VL3-L6-CL-L7-VH3-L8-CH1-Fc; VL3-L6-CH1-L7-VH3-L8-CL-Fc; VH3-L6-CH1-L7-VL3-L8-CL-Fc; VH3-L6-CL-L7-VL3-L8-CH1-Fc; VL3-VH3-L6-CH1-CL-Fc; VH3-VL3-L6-CH1-CL-Fc; VL3-VH3-L6-CL-CH1-Fc; VH3-VL3-L6-CL-CH1-Fc; VL3-CL-L6-VH3-CH1-Fc; VL3-CH1-L6-VH3-CL-Fc; VH3-CH1-L6-VL3-CL-Fc; or VH3-CL-L6-VL3-CH1-Fc. In some aspects, the first polypeptide has a structure represented by VL1-L1-VL2-L2-VH2-L3-VH1-L4-CL-L5-CH1-Fc and the second polypeptide has a structure represented by VL3-VH3-CH1-Fc; VH3-VL3-CH1-Fe; VL3-VH3-CL-Fc; VH3-VL3-CL-Fc; VL3-VH3-CH1-CL-Fc; VH3-VL3-CH1-CL-Fc; VL3-VH3-CL-CH1-Fc; VH3-VL3-CL-CH1-Fc; VL3-CL-VH3-CH1-Fc; VL3-CH1-VH3-CL-Fc; VH3-CH1-VL3-CL-Fc; VH3-CL-VL3-CH1-Fc; VL3-L6-VH3-L7-CH1-Fc; VH3-L6-VL3-L7-CH1-Fc; VL3-L6-VH3-L7-CL-Fc; VH3-L6-VL3-L7-CL-Fc; VL3-L6-VH3-L7-CH1-L8-CL-Fc; VH3-L6-VL3-L7-CH1-L8-CL-Fc; VL3-L6-VH3-L7-CL-L8-CH1-Fc; VH3-L6-VL3-L7-CL-L8-CH1-Fc; VL3-L6-CL-L7-VH3-L8-CH1-Fc; VL3-L6-CH1-L7-VH3-L8-CL-Fc; VH3-L6-CH1-L7-VL3-L8-CL-Fc; VH3-L6-CL-L7-VL3-L8-CH1-Fc; VL3-VH3-L6-CH1-CL-Fc; VH3-VL3-L6-CH1-CL-Fc; VL3-VH3-L6-CL-CH1-Fc; VH3-VL3-L6-CL-CH1-Fc; VL3-CL-L6-VH3-CH1-Fc; VL3-CH1-L6-VH3-CL-Fc; VH3-CH1-L6-VL3-CL-Fc; or VH3-CL-L6-VL3-CH1-Fc. In some aspects, the first polypeptide has a structure represented by VH1-L1-VH2-L2-VL2-L3-VL1-L4-CL-L5-CH1-Fc and the second polypeptide has a structure represented by VL3-VH3-CH1-Fc; VH3-VL3-CH1-Fe; VL3-VH3-CL-Fc; VH3-VL3-CL-Fc; VL3-VH3-CH1-CL-Fc; VH3-VL3-CH1-CL-Fc; VL3-VH3-CL-CH1-Fc; VH3-VL3-CL-CH1-Fc; VL3-CL-VH3-CH1-Fc; VL3-CH1-VH3-CL-Fc; VH3-CH1-VL3-CL-Fc; VH3-CL-VL3-CH1-Fc; VL3-L6-VH3-L7-CH1-Fc; VH3-L6-VL3-L7-CH1-Fc; VL3-L6-VH3-L7-CL-Fc; VH3-L6-VL3-L7-CL-Fc; VL3-L6-VH3-L7-CH1-L8-CL-Fc; VH3-L6-VL3-L7-CH1-L8-CL-Fc; VL3-L6-VH3-L7-CL-L8-CH1-Fc; VH3-L6-VL3-L7-CL-L8-CH1-Fc; VL3-L6-CL-L7-VH3-L8-CH1-Fc; VL3-L6-CH1-L7-VH3-L8-CL-Fc; VH3-L6-CH1-L7-VL3-L8-CL-Fc; VH3-L6-CL-L7-VL3-L8-CH1-Fc; VL3-VH3-L6-CH1-CL-Fc; VH3-VL3-L6-CH1-CL-Fc; VL3-VH3-L6-CL-CH1-Fc; VH3-VL3-L6-CL-CH1-Fc; VL3-CL-L6-VH3-CH1-Fc; VL3-CH1-L6-VH3-CL-Fc; VH3-CH1-L6-VL3-CL-Fc; or VH3-CL-L6-VL3-CH1-Fc.

[0126] In other aspects, the invention is directed to an antigen binding polypeptide complex comprising a first polypeptide and a second polypeptide; wherein the first polypeptide has a structure represented by VL1-VL2-VH2-VH1; VH1-VH2-VL2-VL1; VL1-L1-VL2-L2-VH2-L3-VH1; VH1-L1-VH2-L2-VL2-L3-VL1; VL1-VL2-VH2-VH1-Fc; VH1-VH2-VL2-VL1-Fc; VL1-L1-VL2-L2-VH2-L3-VH1-Fc; VH1-L1-VH2-L2-VL2-L3-VL1-Fc; VL1-L1-VL2-L2-VH2-L3-VH1-L4-Fc; VH1-L1-VH2-L2-VL2-L3-VL1-L4-Fc; VL1-VL2-VH2-VH1-CH1; VH1-VH2-VL2-VL1-CH1; VL1-VL2-VH2-VH1-CL; VH1-VH2-VL2-VL1-CL; VL1-VL2-VH2-VH1-CH1-CL; VH1-VH2-VL2-VL1-CH1-CL; VL1-VL2-VH2-VH1-CL-CH1; VH1-VH2-VL2-VL1-CL-CH1; VL1-L1-VL2-L2-VH2-L3-VH1-L4-CH1; VH1-L1-VH2-L2-VL2-L3-VL1-L4-CH1; VL1-L1-VL2-L2-VH2-L3-VH1-L4-CL; VH1-L1-VH2-L2-VL2-L3-VL1-L4-CL; VL1-L1-VL2-L2-VH2-L3-VH1-L4-CH1-L5-CL; VH1-L1-VH2-L2-VL2-L3-VL1-L4-CH1-L5-CL; VL1-L1-VL2-L2-VH2-L3-VH1-L4-CL-L5-CH1; VH1-L1-VH2-L2-VL2-L3-VL1-L4-CL-L5-CH1; VL1-VL2-VH2-VH1-CH1-Fc; VH1-VH2-VL2-VL1-CH1-Fc; VL1-VL2-VH2-VH1-CL-Fc; VH1-VH2-VL2-VL1-CL-Fc; VL1-VL2-VH2-VH11-CH1-CL-Fc; VH1-VH2-VL2-VL1-CH1-CL-Fc; VL1-VL2-VH2-VH1-CL-CH1-Fc; VH1-VH2-VL2-VL1-CL-CH1-Fc; VL1-L1-VL2-L2-VH2-L3-VH1-L4-CH1-Fc; VH1-L1-VH2-L2-VL2-L3-VL1-L4-CH1-Fc; VL1-L1-VL2-L2-VH2-L3-VH1-L4-CL-Fc; VH1-L1-VH2-L2-VL2-L3-VL1-L4-CL-Fc; VL1-L1-VL2-L2-VH2-L3-VH1-L4-CH1-L5-CL-Fc; VH1-L1-VH2-L2-VL2-L3-VL1-L4-CH1-L5-CL-Fc; VL1-L1-VL2-L2-VH2-L3-VH1-L4-CL-L5-CH1-Fc; or VH1-L1-VH2-L2-VL2-L3-VL1-L4-CL-L5-CH1-Fc; wherein the second polypeptide has a structure represented by VL3-VH3; VH3-VL3; VL3-L4-VH3; VH3-L4-VL3; VL3-VH3-Fc; VH3-VL3-Fc; VL3-L4-VH3-Fc; VH3-L4-VL3-Fc; VL3-VH3-CH1; VH3-VL3-CH1; VL3-VH3-CL; VH3-VL3-CL; VL3-VH3-CH1-CL; VH3-VL3-CH1-CL; VL3-VH3-CL-CH1; VH3-VL3-CL-CH1; VL3-CL-VH3-CH1; VL3-CH1-VH3-CL; VH3-CH1-VL3-CL; VH3-CL-VL3-CH1; VL3-L6-VH3-L7-CH1; VH3-L6-VL3-L7-CH1; VL3-L6-VH3-L7-CL; VH3-L6-VL3-L7-CL; VL3-L6-VH3-L7-CH1-L8-CL; VH3-L6-VL3-L7-CH1-L8-CL; VL3-L6-VH3-L7-CL-L8-CH1; VH3-L6-VL3-L7-CL-L8-CH1; VL3-L6-CL-L7-VH3-L8-CH1; VL3-L6-CH1-L7-VH3-L8-CL; VH3-L6-CH-L7-VL3-L8-CL; VH3-L6-CL-L7-VL3-L8-CH1; VL3-VH3-L6-CH1-CL; VH3-VL3-L6-CH1-CL; VL3-VH3-L6-CL-CH1; VH3-VL3-L6-CL-CH1; VL3-CL-L6-VH3-CH1; VL3-CH1-L6-VH3-CL; VH3-CH1-L6-VL3-CL; VH3-CL-L6-VL3-CH1; VL3-VH3-CH1-Fc; VH3-VL3-CH1-Fc; VL3-VH3-CL-Fc; VH3-VL3-CL-Fc; VL3-VH3-CH1-CL-Fc; VH3-VL3-CH1-CL-Fc; VL3-VH3-CL-CH1-Fc; VH3-VL3-CL-CH1-Fc; VL3-CL-VH3-CH1-Fc; VL3-CH1-VH3-CL-Fc; VH3-CH1-VL3-CL-Fc; VH3-CL-VL3-CH1-Fc; VL3-L6-VH3-L7-CH1-Fc; VH3-L6-VL3-L7-CH1-Fe; VL3-L6-VH3-L7-CL-Fc; VH3-L6-VL3-L7-CL-Fc; VL3-L6-VH3-L7-CH1-L8-CL-Fc; VH3-L6-VL3-L7-CH1-L8-CL-Fc; VL3-L6-VH3-L7-CL-L8-CH1-Fc; VH3-L6-VL3-L7-CL-L8-CH1-Fc; VL3-L6-CL-L7-VH3-L8-CH1-Fc; VL3-L6-CH1-L7-VH3-L8-CL-Fc; VH3-L6-CH1-L7-VL3-L8-CL-Fc; VH3-L6-CL-L7-VL3-L8-CH1-Fc; VL3-VH3-L6-CH1-CL-Fc; VH3-VL3-L6-CH1-CL-Fc; VL3-VH3-L6-CL-CH1-Fc; VH3-VL3-L6-CL-CH1-Fc; VL3-CL-L6-VH3-CH1-Fc; VL3-CH1-L6-VH3-CL-Fc; VH3-CH1-L6-VL3-CL-Fc; or VH3-CL-L6-VL3-CH1-Fc; wherein VL1 is a first immunoglobulin light chain variable region; VL2 is a second immunoglobulin light chain variable region; VL3 is a third immunoglobulin light chain variable region; VH1 is a first immunoglobulin heavy chain variable region; VH2 is a second immunoglobulin heavy chain variable region; VH3 is a third immunoglobulin heavy chain variable region; Fe is a region comprising an immunoglobulin heavy chain constant region 2 (CH2), an immunoglobulin heavy chain constant region 3 (CH3), and optionally, an immunoglobulin hinge; CH1 is an immunoglobulin heavy chain constant region 1; CL is an immunoglobulin light chain constant region; and L1, L2, L3, L4, L5, L6, L7 and L8 are amino acid linkers. In some aspects, the first polypeptide has a structure represented by VL1-VL2-VH2-VH1 and the second polypeptide has a structure represented by VL3-VH3; VH3-VL3; VL3-L4-VH3; VH3-L4-VL3; VL3-VH3-Fc; VH3-VL3-Fc; VL3-L4-VH3-Fc; VH3-L4-VL3-Fc; VL3-VH3-CH1; VH3-VL3-CH1; VL3-VH3-CL; VH3-VL3-CL; VL3-VH3-CH1-CL; VH3-VL3-CH1-CL; VL3-VH3-CL-CH1; VH3-VL3-CL-CH1; VL3-CL-VH3-CH1; VL3-CH1-VH3-CL; VH3-CH1-VL3-CL; VH3-CL-VL3-CH1; VL3-L6-VH3-L7-CH1; VH3-L6-VL3-L7-CH1; VL3-L6-VH3-L7-CL; VH3-L6-VL3-L7-CL; VL3-L6-VH3-L7-CH1-L8-CL; VH3-L6-VL3-L7-CH1-L8-CL; VL3-L6-VH3-L7-CL-L8-CH1; VH3-L6-VL3-L7-CL-L8-CH1; VL3-L6-CL-L7-VH3-L8-CH1; VL3-L6-CH1-L7-VH3-L8-CL; VH3-L6-CH1-L7-VL3-L8-CL; VH3-L6-CL-L7-VL3-L8-CH1; VL3-VH3-L6-CH1-CL; VH3-VL3-L6-CH1-CL; VL3-VH3-L6-CL-CH1; VH3-VL3-L6-CL-CH1; VL3-CL-L6-VH3-CH1; VL3-CH1-L6-VH3-CL; VH3-CH1-L6-VL3-CL; VH3-CL-L6-VL3-CH1; VL3-VH3-CH1-Fc; VH3-VL3-CH1-Fc; VL3-VH3-CL-Fc; VH3-VL3-CL-Fc; VL3-VH3-CH1-CL-Fc; VH3-VL3-CH1-CL-Fc; VL3-VH3-CL-CH1-Fc; VH3-VL3-CL-CH1-Fc; VL3-CL-VH3-CH1-Fc; VL3-CH1-VH3-CL-Fc; VH3-CH1-VL3-CL-Fc; VH3-CL-VL3-CH1-Fc; VL3-L6-VH3-L7-CH1-Fc; VH3-L6-VL3-L7-CH1-Fc; VL3-L6-VH3-L7-CL-Fc; VH3-L6-VL3-L7-CL-Fe; VL3-L6-VH3-L7-CH1-L8-CL-Fc; VH3-L6-VL3-L7-CH1-L8-CL-Fc; VL3-L6-VH3-L7-CL-L8-CH1-Fc; VH3-L6-VL3-L7-CL-L8-CH1-Fc; VL3-L6-CL-L7-VH3-L8-CH1-Fc; VL3-L6-CH1-L7-VH3-L8-CL-Fc; VH3-L6-CH1-L7-VL3-L8-CL-Fc; VH3-L6-CL-L7-VL3-L8-CH1-Fc; VL3-VH3-L6-CH1-CL-Fc; VH3-VL3-L6-CH1-CL-Fc; VL3-VH3-L6-CL-CH1-Fc; VH3-VL3-L6-CL-CH1-Fc; VL3-CL-L6-VH3-CH1-Fc; VL3-CH1-L6-VH3-CL-Fc; VH3-CH1-L6-VL3-CL-Fc; or VH3-CL-L6-VL3-CH1-Fe. In some aspects, the first polypeptide has a structure represented by VH1-VH2-VL2-VL1 and the second polypeptide has a structure represented by VL3-VH3; VH3-VL3; VL3-L4-VH3; VH3-L4-VL3; VL3-VH3-Fc; VH3-VL3-Fc; VL3-L4-VH3-Fc; VH3-L4-VL3-Fc; VL3-VH3-CH1; VH3-VL3-CH1; VL3-VH3-CL; VH3-VL3-CL; VL3-VH3-CH1-CL; VH3-VL3-CH1-CL; VL3-VH3-CL-CH1; VH3-VL3-CL-CH1; VL3-CL-VH3-CH1; VL3-CH1-VH3-CL; VH3-CH1-VL3-CL; VH3-CL-VL3-CH1; VL3-L6-VH3-L7-CH1; VH3-L6-VL3-L7-CH1; VL3-L6-VH3-L7-CL; VH3-L6-VL3-L7-CL; VL3-L6-VH3-L7-CH1-L8-CL; VH3-L6-VL3-L7-CH1-L8-CL; VL3-L6-VH3-L7-CL-L8-CH1; VH3-L6-VL3-L7-CL-L8-CH1; VL3-L6-CL-L7-VH3-L8-CH1; VL3-L6-CH1-L7-VH3-L8-CL; VH3-L6-CH1-L7-VL3-L8-CL; VH3-L6-CL-L7-VL3-L8-CH1; VL3-VH3-L6-CH1-CL; VH3-VL3-L6-CH1-CL; VL3-VH3-L6-CL-CH1; VH3-VL3-L6-CL-CH1; VL3-CL-L6-VH3-CH1; VL3-CH1-L6-VH3-CL; VH3-CH1-L6-VL3-CL; VH3-CL-L6-VL3-CH1; VL3-VH3-CH1-Fc; VH3-VL3-CH1-Fc; VL3-VH3-CL-Fc; VH3-VL3-CL-Fc; VL3-VH3-CH1-CL-Fc; VH3-VL3-CH1-CL-Fc; VL3-VH3-CL-CH1-Fc; VH3-VL3-CL-CH1-Fc; VL3-CL-VH3-CH1-Fc; VL3-CH1-VH3-CL-Fc; VH3-CH1-VL3-CL-Fc; VH3-CL-VL3-CH1-Fc; VL3-L6-VH3-L7-CH1-Fc; VH3-L6-VL3-L7-CH1-Fc; VL3-L6-VH3-L7-CL-Fc; VH3-L6-VL3-L7-CL-Fc; VL3-L6-VH3-L7-CH1-L8-CL-Fc; VH3-L6-VL3-L7-CH1-L8-CL-Fe; VL3-L6-VH3-L7-CL-L8-CH1-Fc; VH3-L6-VL3-L7-CL-L8-CH1-Fc; VL3-L6-CL-L7-VH3-L8-CH1-Fc; VL3-L6-CH1-L7-VH3-L8-CL-Fc; VH3-L6-CH1-L7-VL3-L8-CL-Fc; VH3-L6-CL-L7-VL3-L8-CH1-Fc; VL3-VH3-L6-CH1-CL-Fe; VH3-VL3-L6-CH1-CL-Fc; VL3-VH3-L6-CL-CH1-Fc; VH3-VL3-L6-CL-CH1-Fc; VL3-CL-L6-VH3-CH1-Fc; VL3-CH1-L6-VH3-CL-Fc; VH3-CH1-L6-VL3-CL-Fc; or VH3-CL-L6-VL3-CH1-Fc. In some aspects, the first polypeptide has a structure represented by VL1-L1-VL2-L2-VH2-L3-VH1 and the second polypeptide has a structure represented by VL3-VH3; VH3-VL3; VL3-L4-VH3; VH3-L4-VL3; VL3-VH3-Fc; VH3-VL3-Fc; VL3-L4-VH3-Fc; VH3-L4-VL3-Fc; VL3-VH3-CH1; VH3-VL3-CH1; VL3-VH3-CL; VH3-VL3-CL; VL3-VH3-CH1-CL; VH3-VL3-CH1-CL; VL3-VH3-CL-CH1; VH3-VL3-CL-CH1; VL3-CL-VH3-CH1; VL3-CH1-VH3-CL; VH3-CH1-VL3-CL; VH3-CL-VL3-CH1; VL3-L6-VH3-L7-CH1; VH3-L6-VL3-L7-CH1; VL3-L6-VH3-L7-CL; VH3-L6-VL3-L7-CL; VL3-L6-VH3-L7-CH1-L8-CL; VH3-L6-VL3-L7-CH1-L8-CL; VL3-L6-VH3-L7-CL-L8-CH1; VH3-L6-VL3-L7-CL-L8-CH1; VL3-L6-CL-L7-VH3-L8-CH1; VL3-L6-CH1-L7-VH3-L8-CL; VH3-L6-CH1-L7-VL3-L8-CL; VH3-L6-CL-L7-VL3-L8-CH1; VL3-VH3-L6-CH1-CL; VH3-VL3-L6-CH1-CL; VL3-VH3-L6-CL-CH1; VH3-VL3-L6-CL-CH1; VL3-CL-L6-VH3-CH1; VL3-CH1-L6-VH3-CL; VH3-CH1-L6-VL3-CL; VH3-CL-L6-VL3-CH1; VL3-VH3-CH1-Fc; VH3-VL3-CH1-Fc; VL3-VH3-CL-Fc; VH3-VL3-CL-Fc; VL3-VH3-CH1-CL-Fc; VH3-VL3-CH1-CL-Fc; VL3-VH3-CL-CH1-Fc; VH3-VL3-CL-CH1-Fc; VL3-CL-VH3-CH1-Fc; VL3-CH1-VH3-CL-Fc; VH3-CH1-VL3-CL-Fc; VH3-CL-VL3-CH1-Fc; VL3-L6-VH3-L7-CH1-Fc; VH3-L6-VL3-L7-CH1-Fc; VL3-L6-VH3-L7-CL-Fc; VH3-L6-VL3-L7-CL-Fe; VL3-L6-VH3-L7-CH1-L8-CL-Fc; VH3-L6-VL3-L7-CH1-L8-CL-Fc; VL3-L6-VH3-L7-CL-L8-CH1-Fc; VH3-L6-VL3-L7-CL-L8-CH1-Fc; VL3-L6-CL-L7-VH3-L8-CH1-Fc; VL3-L6-CH1-L7-VH3-L8-CL-Fc; VH3-L6-CH1-L7-VL3-L8-CL-Fc; VH3-L6-CL-L7-VL3-L8-CH1-Fc; VL3-VH3-L6-CH1-CL-Fc; VH3-VL3-L6-CH1-CL-Fc; VL3-VH3-L6-CL-CH1-Fc; VH3-VL3-L6-CL-CH1-Fc; VL3-CL-L6-VH3-CH1-Fc; VL3-CH1-L6-VH3-CL-Fc; VH3-CH1-L6-VL3-CL-Fc; or VH3-CL-L6-VL3-CH1-Fc. In some aspects, the first polypeptide has a structure represented by VH1-L1-VH2-L2-VL2-L3-VL1 and the second polypeptide has a structure represented by VL3-VH3; VH3-VL3; VL3-L4-VH3; VH3-L4-VL3; VL3-VH3-Fc; VH3-VL3-Fc; VL3-L4-VH3-Fc; VH3-L4-VL3-Fc; VL3-VH3-CH1; VH3-VL3-CH1; VL3-VH3-CL; VH3-VL3-CL; VL3-VH3-CH1-CL; VH3-VL3-CH1-CL; VL3-VH3-CL-CH1; VH3-VL3-CL-CH1; VL3-CL-VH3-CH1; VL3-CH1-VH3-CL; VH3-CH1-VL3-CL; VH3-CL-VL3-CH1; VL3-L6-VH3-L7-CH1; VH3-L6-VL3-L7-CH1; VL3-L6-VH3-L7-CL; VH3-L6-VL3-L7-CL; VL3-L6-VH3-L7-CH1-L8-CL; VH3-L6-VL3-L7-CH1-L8-CL; VL3-L6-VH3-L7-CL-L8-CH1; VH3-L6-VL3-L7-CL-L8-CH1; VL3-L6-CL-L7-VH3-L8-CH1; VL3-L6-CH1-L7-VH3-L8-CL; VH3-L6-CH1-L7-VL3-L8-CL; VH3-L6-CL-L7-VL3-L8-CH1; VL3-VH3-L6-CH1-CL; VH3-VL3-L6-CH1-CL; VL3-VH3-L6-CL-CH1; VH3-VL3-L6-CL-CH1; VL3-CL-L6-VH3-CH1; VL3-CH1-L6-VH3-CL; VH3-CH1-L6-VL3-CL; VH3-CL-L6-VL3-CH1; VL3-VH3-CH1-Fc; VH3-VL3-CH1-Fc; VL3-VH3-CL-Fc; VH3-VL3-CL-Fc; VL3-VH3-CH1-CL-Fc; VH3-VL3-CH1-CL-Fc; VL3-VH3-CL-CH1-Fc; VH3-VL3-CL-CH1-Fc; VL3-CL-VH3-CH1-Fc; VL3-CH1-VH3-CL-Fc; VH3-CH1-VL3-CL-Fc; VH3-CL-VL3-CH1-Fc; VL3-L6-VH3-L7-CH1-Fc; VH3-L6-VL3-L7-CH1-Fe; VL3-L6-VH3-L7-CL-Fc; VH3-L6-VL3-L7-CL-Fc; VL3-L6-VH3-L7-CH1-L8-CL-Fc; VH3-L6-VL3-L7-CH1-L8-CL-Fc; VL3-L6-VH3-L7-CL-L8-CH1-Fc; VH3-L6-VL3-L7-CL-L8-CH1-Fc; VL3-L6-CL-L7-VH3-L8-CH1-Fc; VL3-L6-CH1-L7-VH3-L8-CL-Fc; VH3-L6-CH1-L7-VL3-L8-CL-Fc; VH3-L6-CL-L7-VL3-L8-CH1-Fc; VL3-VH3-L6-CH1-CL-Fc; VH3-VL3-L6-CH1-CL-Fc; VL3-VH3-L6-CL-CH1-Fc; VH3-VL3-L6-CL-CH1-Fc; VL3-CL-L6-VH3-CH1-Fc; VL3-CH1-L6-VH3-CL-Fc; VH3-CH1-L6-VL3-CL-Fc; or VH3-CL-L6-VL3-CH1-Fe. In some aspects, the first polypeptide has a structure represented by VL1-VL2-VH2-VH1-Fc and the second polypeptide has a structure represented by VL3-VH3; VH3-VL3; VL3-L4-VH3; VH3-L4-VL3; VL3-VH3-Fc; VH3-VL3-Fc; VL3-L4-VH3-Fc; VH3-L4-VL3-Fc; VL3-VH3-CH1; VH3-VL3-CH1; VL3-VH3-CL; VH3-VL3-CL; VL3-VH3-CH1-CL; VH3-VL3-CH1-CL; VL3-VH3-CL-CH1; VH3-VL3-CL-CH1; VL3-CL-VH3-CH1; VL3-CH1-VH3-CL; VH3-CH1-VL3-CL; VH3-CL-VL3-CH1; VL3-L6-VH3-L7-CH1; VH3-L6-VL3-L7-CH1; VL3-L6-VH3-L7-CL; VH3-L6-VL3-L7-CL; VL3-L6-VH3-L7-CH1-L8-CL; VH3-L6-VL3-L7-CH1-L8-CL; VL3-L6-VH3-L7-CL-L8-CH1; VH3-L6-VL3-L7-CL-L8-CH1; VL3-L6-CL-L7-VH3-L8-CH1; VL3-L6-CH1-L7-VH3-L8-CL; VH3-L6-CH1-L7-VL3-L8-CL; VH3-L6-CL-L7-VL3-L8-CH1; VL3-VH3-L6-CH1-CL; VH3-VL3-L6-CH1-CL; VL3-VH3-L6-CL-CH1; VH3-VL3-L6-CL-CH1; VL3-CL-L6-VH3-CH1; VL3-CH1-L6-VH3-CL; VH3-CH1-L6-VL3-CL; VH3-CL-L6-VL3-CH1; VL3-VH3-CH1-Fc; VH3-VL3-CH1-Fc; VL3-VH3-CL-Fc; VH3-VL3-CL-Fc; VL3-VH3-CH1-CL-Fc; VH3-VL3-CH1-CL-Fc; VL3-VH3-CL-CH1-Fc; VH3-VL3-CL-CH1-Fc; VL3-CL-VH3-CH1-Fc; VL3-CH1-VH3-CL-Fc; VH3-CH1-VL3-CL-Fc; VH3-CL-VL3-CH1-Fc; VL3-L6-VH3-L7-CH1-Fc; VH3-L6-VL3-L7-CH1-Fc; VL3-L6-VH3-L7-CL-Fc; VH3-L6-VL3-L7-CL-Fe; VL3-L6-VH3-L7-CH1-L8-CL-Fc; VH3-L6-VL3-L7-CH1-L8-CL-Fc; VL3-L6-VH3-L7-CL-L8-CH1-Fc; VH3-L6-VL3-L7-CL-L8-CH1-Fc; VL3-L6-CL-L7-VH3-L8-CH1-Fc; VL3-L6-CH1-L7-VH3-L8-CL-Fc; VH3-L6-CH1-L7-VL3-L8-CL-Fc; VH3-L6-CL-L7-VL3-L8-CH1-Fc; VL3-VH3-L6-CH1-CL-Fc; VH3-VL3-L6-CH1-CL-Fc; VL3-VH3-L6-CL-CH1-Fc; VH3-VL3-L6-CL-CH1-Fc; VL3-CL-L6-VH3-CH1-Fc; VL3-CH1-L6-VH3-CL-Fc; VH3-CH1-L6-VL3-CL-Fc; or VH3-CL-L6-VL3-CH1-Fe. In some aspects, the first polypeptide has a structure represented by VH1-VH2-VL2-VL1-Fc and the second polypeptide has a structure represented by VL3-VH3; VH3-VL3; VL3-L4-VH3; VH3-L4-VL3; VL3-VH3-Fc; VH3-VL3-Fc; VL3-L4-VH3-Fc; VH3-L4-VL3-Fc; VL3-VH3-CH1; VH3-VL3-CH1; VL3-VH3-CL; VH3-VL3-CL; VL3-VH3-CH1-CL; VH3-VL3-CH1-CL; VL3-VH3-CL-CH1; VH3-VL3-CL-CH1; VL3-CL-VH3-CH1; VL3-CH1-VH3-CL; VH3-CH1-VL3-CL; VH3-CL-VL3-CH1; VL3-L6-VH3-L7-CH1; VH3-L6-VL3-L7-CH1; VL3-L6-VH3-L7-CL; VH3-L6-VL3-L7-CL; VL3-L6-VH3-L7-CH1-L8-CL; VH3-L6-VL3-L7-CH1-L8-CL; VL3-L6-VH3-L7-CL-L8-CH1; VH3-L6-VL3-L7-CL-L8-CH1; VL3-L6-CL-L7-VH3-L8-CH1; VL3-L6-CH1-L7-VH3-L8-CL; VH3-L6-CH1-L7-VL3-L8-CL; VH3-L6-CL-L7-VL3-L8-CH1; VL3-VH3-L6-CH1-CL; VH3-VL3-L6-CH1-CL; VL3-VH3-L6-CL-CH1; VH3-VL3-L6-CL-CH1; VL3-CL-L6-VH3-CH1; VL3-CH1-L6-VH3-CL; VH3-CH1-L6-VL3-CL; VH3-CL-L6-VL3-CH1; VL3-VH3-CH1-Fc; VH3-VL3-CH1-Fc; VL3-VH3-CL-Fc; VH3-VL3-CL-Fc; VL3-VH3-CH1-CL-Fc; VH3-VL3-CH1-CL-Fc; VL3-VH3-CL-CH1-Fc; VH3-VL3-CL-CH1-Fc; VL3-CL-VH3-CH1-Fc; VL3-CH1-VH3-CL-Fc; VH3-CH1-VL3-CL-Fc; VH3-CL-VL3-CH1-Fc; VL3-L6-VH3-L7-CH1-Fc; VH3-L6-VL3-L7-CH1-Fc; VL3-L6-VH3-L7-CL-Fc; VH3-L6-VL3-L7-CL-Fc; VL3-L6-VH3-L7-CH1-L8-CL-Fc; VH3-L6-VL3-L7-CH1-L8-CL-Fe; VL3-L6-VH3-L7-CL-L8-CH1-Fc; VH3-L6-VL3-L7-CL-L8-CH1-Fc; VL3-L6-CL-L7-VH3-L8-CH1-Fc; VL3-L6-CH1-L7-VH3-L8-CL-Fc; VH3-L6-CH1-L7-VL3-L8-CL-Fc; VH3-L6-CL-L7-VL3-L8-CH1-Fc; VL3-VH3-L6-CH1-CL-Fe; VH3-VL3-L6-CH1-CL-Fc; VL3-VH3-L6-CL-CH1-Fc; VH3-VL3-L6-CL-CH1-Fc; VL3-CL-L6-VH3-CH1-Fc; VL3-CH1-L6-VH3-CL-Fc; VH3-CH1-L6-VL3-CL-Fc; or VH3-CL-L6-VL3-CH1-Fc. In some aspects, the first polypeptide has a structure represented by VL1-L1-VL2-L2-VH2-L3-VH1-Fc and the second polypeptide has a structure represented by VL3-VH3; VH3-VL3; VL3-L4-VH3; VH3-L4-VL3; VL3-VH3-Fc; VH3-VL3-Fc; VL3-L4-VH3-Fc; VH3-L4-VL3-Fc; VL3-VH3-CH1; VH3-VL3-CH1; VL3-VH3-CL; VH3-VL3-CL; VL3-VH3-CH1-CL; VH3-VL3-CH1-CL; VL3-VH3-CL-CH1; VH3-VL3-CL-CH1; VL3-CL-VH3-CH1; VL3-CH1-VH3-CL; VH3-CH1-VL3-CL; VH3-CL-VL3-CH1; VL3-L6-VH3-L7-CH1; VH3-L6-VL3-L7-CH1; VL3-L6-VH3-L7-CL; VH3-L6-VL3-L7-CL; VL3-L6-VH3-L7-CH1-L8-CL; VH3-L6-VL3-L7-CH1-L8-CL; VL3-L6-VH3-L7-CL-L8-CH1; VH3-L6-VL3-L7-CL-L8-CH1; VL3-L6-CL-L7-VH3-L8-CH1; VL3-L6-CH1-L7-VH3-L8-CL; VH3-L6-CH1-L7-VL3-L8-CL; VH3-L6-CL-L7-VL3-L8-CH1; VL3-VH3-L6-CH1-CL; VH3-VL3-L6-CH1-CL; VL3-VH3-L6-CL-CH1; VH3-VL3-L6-CL-CH1; VL3-CL-L6-VH3-CH1; VL3-CH1-L6-VH3-CL; VH3-CH1-L6-VL3-CL; VH3-CL-L6-VL3-CH1; VL3-VH3-CH1-Fc; VH3-VL3-CH1-Fc; VL3-VH3-CL-Fc; VH3-VL3-CL-Fc; VL3-VH3-CH1-CL-Fc; VH3-VL3-CH1-CL-Fc; VL3-VH3-CL-CH1-Fc; VH3-VL3-CL-CH1-Fc; VL3-CL-VH3-CH1-Fc; VL3-CH1-VH3-CL-Fc; VH3-CH1-VL3-CL-Fc; VH3-CL-VL3-CH1-Fc; VL3-L6-VH3-L7-CH1-Fc; VH3-L6-VL3-L7-CH1-Fc; VL3-L6-VH3-L7-CL-Fc; VH3-L6-VL3-L7-CL-Fe; VL3-L6-VH3-L7-CH1-L8-CL-Fc; VH3-L6-VL3-L7-CH1-L8-CL-Fc; VL3-L6-VH3-L7-CL-L8-CH1-Fc; VH3-L6-VL3-L7-CL-L8-CH1-Fc; VL3-L6-CL-L7-VH3-L8-CH1-Fc; VL3-L6-CH1-L7-VH3-L8-CL-Fc; VH3-L6-CH1-L7-VL3-L8-CL-Fc; VH3-L6-CL-L7-VL3-L8-CH1-Fc; VL3-VH3-L6-CH1-CL-Fc; VH3-VL3-L6-CH1-CL-Fc; VL3-VH3-L6-CL-CH1-Fc; VH3-VL3-L6-CL-CH1-Fc; VL3-CL-L6-VH3-CH1-Fc; VL3-CH1-L6-VH3-CL-Fc; VH3-CH1-L6-VL3-CL-Fc; or VH3-CL-L6-VL3-CH1-Fc. In some aspects, the first polypeptide has a structure represented by VH1-L1-VH2-L2-VL2-L3-VL1-Fc and the second polypeptide has a structure represented by VL3-VH3; VH3-VL3; VL3-L4-VH3; VH3-L4-VL3; VL3-VH3-Fc; VH3-VL3-Fc; VL3-L4-VH3-Fc; VH3-L4-VL3-Fc; VL3-VH3-CH1; VH3-VL3-CH1; VL3-VH3-CL; VH3-VL3-CL; VL3-VH3-CH1-CL; VH3-VL3-CH1-CL; VL3-VH3-CL-CH1; VH3-VL3-CL-CH1; VL3-CL-VH3-CH1; VL3-CH1-VH3-CL; VH3-CH1-VL3-CL; VH3-CL-VL3-CH1; VL3-L6-VH3-L7-CH1; VH3-L6-VL3-L7-CH1; VL3-L6-VH3-L7-CL; VH3-L6-VL3-L7-CL; VL3-L6-VH3-L7-CH1-L8-CL; VH3-L6-VL3-L7-CH1-L8-CL; VL3-L6-VH3-L7-CL-L8-CH1; VH3-L6-VL3-L7-CL-L8-CH1; VL3-L6-CL-L7-VH3-L8-CH1; VL3-L6-CH1-L7-VH3-L8-CL; VH3-L6-CH1-L7-VL3-L8-CL; VH3-L6-CL-L7-VL3-L8-CH1; VL3-VH3-L6-CH1-CL; VH3-VL3-L6-CH1-CL; VL3-VH3-L6-CL-CH1; VH3-VL3-L6-CL-CH1; VL3-CL-L6-VH3-CH1; VL3-CH1-L6-VH3-CL; VH3-CH1-L6-VL3-CL; VH3-CL-L6-VL3-CH1; VL3-VH3-CH1-Fc; VH3-VL3-CH1-Fc; VL3-VH3-CL-Fc; VH3-VL3-CL-Fc; VL3-VH3-CH1-CL-Fc; VH3-VL3-CH1-CL-Fc; VL3-VH3-CL-CH1-Fc; VH3-VL3-CL-CH1-Fc; VL3-CL-VH3-CH1-Fe; VL3-CH1-VH3-CL-Fc; VH3-CH1-VL3-CL-Fc; VH3-CL-VL3-CH1-Fc; VL3-L6-VH3-L7-CH1-Fc; VH3-L6-VL3-L7-CH1-Fc; VL3-L6-VH3-L7-CL-Fc; VH3-L6-VL3-L7-CL-Fc; VL3-L6-VH3-L7-CH1-L8-CL-Fc; VH3-L6-VL3-L7-CH1-L8-CL-Fc; VL3-L6-VH3-L7-CL-L8-CH1-Fc; VH3-L6-VL3-L7-CL-L8-CH1-Fc; VL3-L6-CL-L7-VH3-L8-CH1-Fe; VL3-L6-CH1-L7-VH3-L8-CL-Fc; VH3-L6-CH1-L7-VL3-L8-CL-Fc; VH3-L6-CL-L7-VL3-L8-CH1-Fc; VL3-VH3-L6-CH1-CL-Fc; VH3-VL3-L6-CH1-CL-Fc; VL3-VH3-L6-CL-CH1-Fc; VH3-VL3-L6-CL-CH1-Fc; VL3-CL-L6-VH3-CH1-Fc; VL3-CH1-L6-VH3-CL-Fc; VH3-CH1-L6-VL3-CL-Fc; or VH3-CL-L6-VL3-CH1-Fc. In some aspects, the first polypeptide has a structure represented by VL1-L1-VL2-L2-VH2-L3-VH1-L4-Fc and the second polypeptide has a structure represented by VL3-VH3; VH3-VL3; VL3-L4-VH3; VH3-L4-VL3; VL3-VH3-Fc; VH3-VL3-Fc; VL3-L4-VH3-Fc; VH3-L4-VL3-Fc; VL3-VH3-CH1; VH3-VL3-CH1; VL3-VH3-CL; VH3-VL3-CL; VL3-VH3-CH1-CL; VH3-VL3-CH1-CL; VL3-VH3-CL-CH1; VH3-VL3-CL-CH1; VL3-CL-VH3-CH1; VL3-CH1-VH3-CL; VH3-CH1-VL3-CL; VH3-CL-VL3-CH1; VL3-L6-VH3-L7-CH1; VH3-L6-VL3-L7-CH1; VL3-L6-VH3-L7-CL; VH3-L6-VL3-L7-CL; VL3-L6-VH3-L7-CH1-L8-CL; VH3-L6-VL3-L7-CH1-L8-CL; VL3-L6-VH3-L7-CL-L8-CH1; VH3-L6-VL3-L7-CL-L8-CH1; VL3-L6-CL-L7-VH3-L8-CH1; VL3-L6-CH1-L7-VH3-L8-CL; VH3-L6-CH1-L7-VL3-L8-CL; VH3-L6-CL-L7-VL3-L8-CH1; VL3-VH3-L6-CH1-CL; VH3-VL3-L6-CH1-CL; VL3-VH3-L6-CL-CH1; VH3-VL3-L6-CL-CH1; VL3-CL-L6-VH3-CH1; VL3-CH1-L6-VH3-CL; VH3-CH1-L6-VL3-CL; VH3-CL-L6-VL3-CH1; VL3-VH3-CH1-Fc; VH3-VL3-CH1-Fc; VL3-VH3-CL-Fc; VH3-VL3-CL-Fc; VL3-VH3-CH1-CL-Fc; VH3-VL3-CH1-CL-Fc; VL3-VH3-CL-CH1-Fc; VH3-VL3-CL-CH1-Fc; VL3-CL-VH3-CH1-Fc; VL3-CH1-VH3-CL-Fc; VH3-CH1-VL3-CL-Fc; VH3-CL-VL3-CH1-Fc; VL3-L6-VH3-L7-CH1-Fc; VH3-L6-VL3-L7-CH1-Fc; VL3-L6-VH3-L7-CL-Fc; VH3-L6-VL3-L7-CL-Fe; VL3-L6-VH3-L7-CH1-L8-CL-Fc; VH3-L6-VL3-L7-CH1-L8-CL-Fc; VL3-L6-VH3-L7-CL-L8-CH1-Fc; VH3-L6-VL3-L7-CL-L8-CH1-Fc; VL3-L6-CL-L7-VH3-L8-CH1-Fc; VL3-L6-CH1-L7-VH3-L8-CL-Fc; VH3-L6-CH1-L7-VL3-L8-CL-Fc; VH3-L6-CL-L7-VL3-L8-CH1-Fc; VL3-VH3-L6-CH1-CL-Fc; VH3-VL3-L6-CH1-CL-Fc; VL3-VH3-L6-CL-CH1-Fc; VH3-VL3-L6-CL-CH1-Fc; VL3-CL-L6-VH3-CH1-Fc; VL3-CH1-L6-VH3-CL-Fc; VH3-CH1-L6-VL3-CL-Fc; or VH3-CL-L6-VL3-CH1-Fc. In some aspects, the first polypeptide has a structure represented by VH1-L1-VH2-L2-VL2-L3-VL1-L4-Fc and the second polypeptide has a structure represented by VL3-VH3; VH3-VL3; VL3-L4-VH3; VH3-L4-VL3; VL3-VH3-Fc; VH3-VL3-Fc; VL3-L4-VH3-Fc; VH3-L4-VL3-Fc; VL3-VH3-CH1; VH3-VL3-CH1; VL3-VH3-CL; VH3-VL3-CL; VL3-VH3-CH1-CL; VH3-VL3-CH1-CL; VL3-VH3-CL-CH1; VH3-VL3-CL-CH1; VL3-CL-VH3-CH1; VL3-CH1-VH3-CL; VH3-CH1-VL3-CL; VH3-CL-VL3-CH1; VL3-L6-VH3-L7-CH1; VH3-L6-VL3-L7-CH1; VL3-L6-VH3-L7-CL; VH3-L6-VL3-L7-CL; VL3-L6-VH3-L7-CH1-L8-CL; VH3-L6-VL3-L7-CH1-L8-CL; VL3-L6-VH3-L7-CL-L8-CH1; VH3-L6-VL3-L7-CL-L8-CH1; VL3-L6-CL-L7-VH3-L8-CH1; VL3-L6-CH1-L7-VH3-L8-CL; VH3-L6-CH1-L7-VL3-L8-CL; VH3-L6-CL-L7-VL3-L8-CH1; VL3-VH3-L6-CH1-CL; VH3-VL3-L6-CH1-CL; VL3-VH3-L6-CL-CH1; VH3-VL3-L6-CL-CH1; VL3-CL-L6-VH3-CH1; VL3-CH1-L6-VH3-CL; VH3-CH1-L6-VL3-CL; VH3-CL-L6-VL3-CH1; VL3-VH3-CH1-Fc; VH3-VL3-CH1-Fc; VL3-VH3-CL-Fc; VH3-VL3-CL-Fc; VL3-VH3-CH1-CL-Fc; VH3-VL3-CH1-CL-Fc; VL3-VH3-CL-CH1-Fc; VH3-VL3-CL-CH1-Fc; VL3-CL-VH3-CH1-Fe; VL3-CH1-VH3-CL-Fc; VH3-CH1-VL3-CL-Fc; VH3-CL-VL3-CH1-Fc; VL3-L6-VH3-L7-CH1-Fc; VH3-L6-VL3-L7-CH1-Fc; VL3-L6-VH3-L7-CL-Fc; VH3-L6-VL3-L7-CL-Fc; VL3-L6-VH3-L7-CH1-L8-CL-Fc; VH3-L6-VL3-L7-CH1-L8-CL-Fc; VL3-L6-VH3-L7-CL-L8-CH1-Fc; VH3-L6-VL3-L7-CL-L8-CH1-Fc; VL3-L6-CL-L7-VH3-L8-CH1-Fe; VL3-L6-CH1-L7-VH3-L8-CL-Fc; VH3-L6-CH1-L7-VL3-L8-CL-Fc; VH3-L6-CL-L7-VL3-L8-CH1-Fc; VL3-VH3-L6-CH1-CL-Fc; VH3-VL3-L6-CH1-CL-Fc; VL3-VH3-L6-CL-CH1-Fc; VH3-VL3-L6-CL-CH1-Fc; VL3-CL-L6-VH3-CH1-Fc; VL3-CH1-L6-VH3-CL-Fc; VH3-CH1-L6-VL3-CL-Fc; or VH3-CL-L6-VL3-CH1-Fc. In some aspects, the first polypeptide has a structure represented by VL1-VL2-VH2-VH1-CH1 and the second polypeptide has a structure represented by VL3-VH3; VH3-VL3; VL3-L4-VH3; VH3-L4-VL3; VL3-VH3-Fc; VH3-VL3-Fc; VL3-L4-VH3-Fc; VH3-L4-VL3-Fc; VL3-VH3-CH1; VH3-VL3-CH1; VL3-VH3-CL; VH3-VL3-CL; VL3-VH3-CH1-CL; VH3-VL3-CH1-CL; VL3-VH3-CL-CH1; VH3-VL3-CL-CH1; VL3-CL-VH3-CH1; VL3-CH1-VH3-CL; VH3-CH1-VL3-CL; VH3-CL-VL3-CH1; VL3-L6-VH3-L7-CH1; VH3-L6-VL3-L7-CH1; VL3-L6-VH3-L7-CL; VH3-L6-VL3-L7-CL; VL3-L6-VH3-L7-CH1-L8-CL; VH3-L6-VL3-L7-CH1-L8-CL; VL3-L6-VH3-L7-CL-L8-CH1; VH3-L6-VL3-L7-CL-L8-CH1; VL3-L6-CL-L7-VH3-L8-CH1; VL3-L6-CH1-L7-VH3-L8-CL; VH3-L6-CH1-L7-VL3-L8-CL; VH3-L6-CL-L7-VL3-L8-CH1; VL3-VH3-L6-CH1-CL; VH3-VL3-L6-CH1-CL; VL3-VH3-L6-CL-CH1; VH3-VL3-L6-CL-CH1; VL3-CL-L6-VH3-CH1; VL3-CH1-L6-VH3-CL; VH3-CH1-L6-VL3-CL; VH3-CL-L6-VL3-CH1; VL3-VH3-CH1-Fc; VH3-VL3-CH1-Fc; VL3-VH3-CL-Fc; VH3-VL3-CL-Fc; VL3-VH3-CH1-CL-Fc; VH3-VL3-CH1-CL-Fc; VL3-VH3-CL-CH1-Fc; VH3-VL3-CL-CH1-Fc; VL3-CL-VH3-CH1-Fc; VL3-CH1-VH3-CL-Fc; VH3-CH1-VL3-CL-Fc; VH3-CL-VL3-CH1-Fc; VL3-L6-VH3-L7-CH1-Fc; VH3-L6-VL3-L7-CH1-Fc; VL3-L6-VH3-L7-CL-Fc; VH3-L6-VL3-L7-CL-Fe; VL3-L6-VH3-L7-CH1-L8-CL-Fc; VH3-L6-VL3-L7-CH1-L8-CL-Fc; VL3-L6-VH3-L7-CL-L8-CH1-Fc; VH3-L6-VL3-L7-CL-L8-CH1-Fc; VL3-L6-CL-L7-VH3-L8-CH1-Fc; VL3-L6-CH1-L7-VH3-L8-CL-Fc; VH3-L6-CH1-L7-VL3-L8-CL-Fc; VH3-L6-CL-L7-VL3-L8-CH1-Fc; VL3-VH3-L6-CH1-CL-Fc; VH3-VL3-L6-CH1-CL-Fc; VL3-VH3-L6-CL-CH1-Fc; VH3-VL3-L6-CL-CH1-Fc; VL3-CL-L6-VH3-CH1-Fc; VL3-CH1-L6-VH3-CL-Fc; VH3-CH1-L6-VL3-CL-Fc; or VH3-CL-L6-VL3-CH1-Fe. In some aspects, the first polypeptide has a structure represented by VH1-VH2-VL2-VL1-CH1 and the second polypeptide has a structure represented by VL3-VH3; VH3-VL3; VL3-L4-VH3; VH3-L4-VL3; VL3-VH3-Fc; VH3-VL3-Fc; VL3-L4-VH3-Fc; VH3-L4-VL3-Fc; VL3-VH3-CH1; VH3-VL3-CH1; VL3-VH3-CL; VH3-VL3-CL; VL3-VH3-CH1-CL; VH3-VL3-CH1-CL; VL3-VH3-CL-CH1; VH3-VL3-CL-CH1; VL3-CL-VH3-CH1; VL3-CH1-VH3-CL; VH3-CH1-VL3-CL; VH3-CL-VL3-CH1; VL3-L6-VH3-L7-CH1; VH3-L6-VL3-L7-CH1; VL3-L6-VH3-L7-CL; VH3-L6-VL3-L7-CL; VL3-L6-VH3-L7-CH1-L8-CL; VH3-L6-VL3-L7-CH1-L8-CL; VL3-L6-VH3-L7-CL-L8-CH1; VH3-L6-VL3-L7-CL-L8-CH1; VL3-L6-CL-L7-VH3-L8-CH1; VL3-L6-CH1-L7-VH3-L8-CL; VH3-L6-CH1-L7-VL3-L8-CL; VH3-L6-CL-L7-VL3-L8-CH1; VL3-VH3-L6-CH1-CL; VH3-VL3-L6-CH1-CL; VL3-VH3-L6-CL-CH1; VH3-VL3-L6-CL-CH1; VL3-CL-L6-VH3-CH1; VL3-CH1-L6-VH3-CL; VH3-CH1-L6-VL3-CL; VH3-CL-L6-VL3-CH1; VL3-VH3-CH1-Fc; VH3-VL3-CH1-Fc; VL3-VH3-CL-Fc; VH3-VL3-CL-Fc; VL3-VH3-CH1-CL-Fc; VH3-VL3-CH1-CL-Fc; VL3-VH3-CL-CH1-Fc; VH3-VL3-CL-CH1-Fc; VL3-CL-VH3-CH1-Fc; VL3-CH1-VH3-CL-Fc; VH3-CH1-VL3-CL-Fc; VH3-CL-VL3-CH1-Fc; VL3-L6-VH3-L7-CH1-Fc; VH3-L6-VL3-L7-CH1-Fe; VL3-L6-VH3-L7-CL-Fc; VH3-L6-VL3-L7-CL-Fc; VL3-L6-VH3-L7-CH1-L8-CL-Fc; VH3-L6-VL3-L7-CH1-L8-CL-Fc; VL3-L6-VH3-L7-CL-L8-CH1-Fc; VH3-L6-VL3-L7-CL-L8-CH1-Fc; VL3-L6-CL-L7-VH3-L8-CH1-Fc; VL3-L6-CH1-L7-VH3-L8-CL-Fc; VH3-L6-CH1-L7-VL3-L8-CL-Fc; VH3-L6-CL-L7-VL3-L8-CH1-Fc; VL3-VH3-L6-CH1-CL-Fc; VH3-VL3-L6-CH1-CL-Fc; VL3-VH3-L6-CL-CH1-Fc; VH3-VL3-L6-CL-CH1-Fc; VL3-CL-L6-VH3-CH1-Fc; VL3-CH1-L6-VH3-CL-Fc; VH3-CH1-L6-VL3-CL-Fc; or VH3-CL-L6-VL3-CH1-Fe. In some aspects, the first polypeptide has a structure represented by VL1-VL2-VH2-VH1-CL and the second polypeptide has a structure represented by VL3-VH3; VH3-VL3; VL3-L4-VH3; VH3-L4-VL3; VL3-VH3-Fc; VH3-VL3-Fc; VL3-L4-VH3-Fc; VH3-L4-VL3-Fc; VL3-VH3-CH1; VH3-VL3-CH1; VL3-VH3-CL; VH3-VL3-CL; VL3-VH3-CH1-CL; VH3-VL3-CH1-CL; VL3-VH3-CL-CH1; VH3-VL3-CL-CH1; VL3-CL-VH3-CH1; VL3-CH1-VH3-CL; VH3-CH1-VL3-CL; VH3-CL-VL3-CH1; VL3-L6-VH3-L7-CH1; VH3-L6-VL3-L7-CH1; VL3-L6-VH3-L7-CL; VH3-L6-VL3-L7-CL; VL3-L6-VH3-L7-CH1-L8-CL; VH3-L6-VL3-L7-CH1-L8-CL; VL3-L6-VH3-L7-CL-L8-CH1; VH3-L6-VL3-L7-CL-L8-CH1; VL3-L6-CL-L7-VH3-L8-CH1; VL3-L6-CH1-L7-VH3-L8-CL; VH3-L6-CH1-L7-VL3-L8-CL; VH3-L6-CL-L7-VL3-L8-CH1; VL3-VH3-L6-CH1-CL; VH3-VL3-L6-CH1-CL; VL3-VH3-L6-CL-CH1; VH3-VL3-L6-CL-CH1; VL3-CL-L6-VH3-CH1; VL3-CH1-L6-VH3-CL; VH3-CH1-L6-VL3-CL; VH3-CL-L6-VL3-CH1; VL3-VH3-CH1-Fc; VH3-VL3-CH1-Fc; VL3-VH3-CL-Fc; VH3-VL3-CL-Fc; VL3-VH3-CH1-CL-Fc; VH3-VL3-CH1-CL-Fc; VL3-VH3-CL-CH1-Fc; VH3-VL3-CL-CH1-Fc; VL3-CL-VH3-CH1-Fc; VL3-CH1-VH3-CL-Fc; VH3-CH1-VL3-CL-Fc; VH3-CL-VL3-CH1-Fc; VL3-L6-VH3-L7-CH1-Fc; VH3-L6-VL3-L7-CH1-Fc; VL3-L6-VH3-L7-CL-Fc; VH3-L6-VL3-L7-CL-Fe; VL3-L6-VH3-L7-CH1-L8-CL-Fc; VH3-L6-VL3-L7-CH1-L8-CL-Fc; VL3-L6-VH3-L7-CL-L8-CH1-Fc; VH3-L6-VL3-L7-CL-L8-CH1-Fc; VL3-L6-CL-L7-VH3-L8-CH1-Fc; VL3-L6-CH1-L7-VH3-L8-CL-Fc; VH3-L6-CH1-L7-VL3-L8-CL-Fc; VH3-L6-CL-L7-VL3-L8-CH1-Fc; VL3-VH3-L6-CH1-CL-Fc; VH3-VL3-L6-CH1-CL-Fc; VL3-VH3-L6-CL-CH1-Fc; VH3-VL3-L6-CL-CH1-Fc; VL3-CL-L6-VH3-CH1-Fc; VL3-CH1-L6-VH3-CL-Fc; VH3-CH1-L6-VL3-CL-Fc; or VH3-CL-L6-VL3-CH1-Fe. In some aspects, the first polypeptide has a structure represented by VH1-VH2-VL2-VL1-CL and the second polypeptide has a structure represented by VL3-VH3; VH3-VL3; VL3-L4-VH3; VH3-L4-VL3; VL3-VH3-Fc; VH3-VL3-Fc; VL3-L4-VH3-Fc; VH3-L4-VL3-Fc; VL3-VH3-CH1; VH3-VL3-CH1; VL3-VH3-CL; VH3-VL3-CL; VL3-VH3-CH1-CL; VH3-VL3-CH1-CL; VL3-VH3-CL-CH1; VH3-VL3-CL-CH1; VL3-CL-VH3-CH1; VL3-CH1-VH3-CL; VH3-CH1-VL3-CL; VH3-CL-VL3-CH1; VL3-L6-VH3-L7-CH1; VH3-L6-VL3-L7-CH1; VL3-L6-VH3-L7-CL; VH3-L6-VL3-L7-CL; VL3-L6-VH3-L7-CH1-L8-CL; VH3-L6-VL3-L7-CH1-L8-CL; VL3-L6-VH3-L7-CL-L8-CH1; VH3-L6-VL3-L7-CL-L8-CH1; VL3-L6-CL-L7-VH3-L8-CH1; VL3-L6-CH1-L7-VH3-L8-CL; VH3-L6-CH1-L7-VL3-L8-CL; VH3-L6-CL-L7-VL3-L8-CH1; VL3-VH3-L6-CH1-CL; VH3-VL3-L6-CH1-CL; VL3-VH3-L6-CL-CH1; VH3-VL3-L6-CL-CH1; VL3-CL-L6-VH3-CH1; VL3-CH1-L6-VH3-CL; VH3-CH1-L6-VL3-CL; VH3-CL-L6-VL3-CH1; VL3-VH3-CH1-Fc; VH3-VL3-CH1-Fc; VL3-VH3-CL-Fc; VH3-VL3-CL-Fc; VL3-VH3-CH1-CL-Fc; VH3-VL3-CH1-CL-Fc; VL3-VH3-CL-CH1-Fc; VH3-VL3-CL-CH1-Fc; VL3-CL-VH3-CH1-Fc; VL3-CH1-VH3-CL-Fc; VH3-CH1-VL3-CL-Fc; VH3-CL-VL3-CH1-Fc; VL3-L6-VH3-L7-CH1-Fc; VH3-L6-VL3-L7-CH1-Fc; VL3-L6-VH3-L7-CL-Fc; VH3-L6-VL3-L7-CL-Fc; VL3-L6-VH3-L7-CH1-L8-CL-Fc; VH3-L6-VL3-L7-CH1-L8-CL-Fe; VL3-L6-VH3-L7-CL-L8-CH1-Fc; VH3-L6-VL3-L7-CL-L8-CH1-Fc; VL3-L6-CL-L7-VH3-L8-CH1-Fc; VL3-L6-CH1-L7-VH3-L8-CL-Fc; VH3-L6-CH1-L7-VL3-L8-CL-Fc; VH3-L6-CL-L7-VL3-L8-CH1-Fc; VL3-VH3-L6-CH1-CL-Fe; VH3-VL3-L6-CH1-CL-Fc; VL3-VH3-L6-CL-CH1-Fc; VH3-VL3-L6-CL-CH1-Fc; VL3-CL-L6-VH3-CH1-Fc; VL3-CH1-L6-VH3-CL-Fc; VH3-CH1-L6-VL3-CL-Fc; or VH3-CL-L6-VL3-CH1-Fe. In some aspects, the first polypeptide has a structure represented by VL1-VL2-VH2-VH1-CH1-CL and the second polypeptide has a structure represented by VL3-VH3; VH3-VL3; VL3-L4-VH3; VH3-L4-VL3; VL3-VH3-Fc; VH3-VL3-Fc; VL3-L4-VH3-Fc; VH3-L4-VL3-Fc; VL3-VH3-CH1; VH3-VL3-CH1; VL3-VH3-CL; VH3-VL3-CL; VL3-VH3-CH1-CL; VH3-VL3-CH1-CL; VL3-VH3-CL-CH1; VH3-VL3-CL-CH1; VL3-CL-VH3-CH1; VL3-CH1-VH3-CL; VH3-CH1-VL3-CL; VH3-CL-VL3-CH1; VL3-L6-VH3-L7-CH1; VH3-L6-VL3-L7-CH1; VL3-L6-VH3-L7-CL; VH3-L6-VL3-L7-CL; VL3-L6-VH3-L7-CH1-L8-CL; VH3-L6-VL3-L7-CH1-L8-CL; VL3-L6-VH3-L7-CL-L8-CH1; VH3-L6-VL3-L7-CL-L8-CH1; VL3-L6-CL-L7-VH3-L8-CH1; VL3-L6-CH1-L7-VH3-L8-CL; VH3-L6-CH1-L7-VL3-L8-CL; VH3-L6-CL-L7-VL3-L8-CH1; VL3-VH3-L6-CH1-CL; VH3-VL3-L6-CH1-CL; VL3-VH3-L6-CL-CH1; VH3-VL3-L6-CL-CH1; VL3-CL-L6-VH3-CH1; VL3-CH1-L6-VH3-CL; VH3-CH1-L6-VL3-CL; VH3-CL-L6-VL3-CH1; VL3-VH3-CH1-Fc; VH3-VL3-CH1-Fc; VL3-VH3-CL-Fc; VH3-VL3-CL-Fc; VL3-VH3-CH1-CL-Fc; VH3-VL3-CH1-CL-Fc; VL3-VH3-CL-CH1-Fc; VH3-VL3-CL-CH1-Fc; VL3-CL-VH3-CH1-Fc; VL3-CH1-VH3-CL-Fc; VH3-CH1-VL3-CL-Fc; VH3-CL-VL3-CH1-Fc; VL3-L6-VH3-L7-CH1-Fc; VH3-L6-VL3-L7-CH1-Fc; VL3-L6-VH3-L7-CL-Fc; VH3-L6-VL3-L7-CL-Fe; VL3-L6-VH3-L7-CH1-L8-CL-Fc; VH3-L6-VL3-L7-CH1-L8-CL-Fc; VL3-L6-VH3-L7-CL-L8-CH1-Fc; VH3-L6-VL3-L7-CL-L8-CH1-Fc; VL3-L6-CL-L7-VH3-L8-CH1-Fc; VL3-L6-CH1-L7-VH3-L8-CL-Fc; VH3-L6-CH1-L7-VL3-L8-CL-Fc; VH3-L6-CL-L7-VL3-L8-CH1-Fc; VL3-VH3-L6-CH1-CL-Fc; VH3-VL3-L6-CH1-CL-Fc; VL3-VH3-L6-CL-CH1-Fc; VH3-VL3-L6-CL-CH1-Fc; VL3-CL-L6-VH3-CH1-Fc; VL3-CH1-L6-VH3-CL-Fc; VH3-CH1-L6-VL3-CL-Fc; or VH3-CL-L6-VL3-CH1-Fe. In some aspects, the first polypeptide has a structure represented by VH1-VH2-VL2-VL1-CH1-CL and the second polypeptide has a structure represented by VL3-VH3; VH3-VL3; VL3-L4-VH3; VH3-L4-VL3; VL3-VH3-Fc; VH3-VL3-Fc; VL3-L4-VH3-Fc; VH3-L4-VL3-Fc; VL3-VH3-CH1; VH3-VL3-CH1; VL3-VH3-CL; VH3-VL3-CL; VL3-VH3-CH1-CL; VH3-VL3-CH1-CL; VL3-VH3-CL-CH1; VH3-VL3-CL-CH1; VL3-CL-VH3-CH1; VL3-CH1-VH3-CL; VH3-CH1-VL3-CL; VH3-CL-VL3-CH1; VL3-L6-VH3-L7-CH1; VH3-L6-VL3-L7-CH1; VL3-L6-VH3-L7-CL; VH3-L6-VL3-L7-CL; VL3-L6-VH3-L7-CH1-L8-CL; VH3-L6-VL3-L7-CH1-L8-CL; VL3-L6-VH3-L7-CL-L8-CH1; VH3-L6-VL3-L7-CL-L8-CH1; VL3-L6-CL-L7-VH3-L8-CH1; VL3-L6-CH1-L7-VH3-L8-CL; VH3-L6-CH1-L7-VL3-L8-CL; VH3-L6-CL-L7-VL3-L8-CH1; VL3-VH3-L6-CH1-CL; VH3-VL3-L6-CH1-CL; VL3-VH3-L6-CL-CH1; VH3-VL3-L6-CL-CH1; VL3-CL-L6-VH3-CH1; VL3-CH1-L6-VH3-CL; VH3-CH1-L6-VL3-CL; VH3-CL-L6-VL3-CH1; VL3-VH3-CH1-Fc; VH3-VL3-CH1-Fc; VL3-VH3-CL-Fc; VH3-VL3-CL-Fc; VL3-VH3-CH1-CL-Fc; VH3-VL3-CH1-CL-Fc; VL3-VH3-CL-CH1-Fc; VH3-VL3-CL-CH1-Fc; VL3-CL-VH3-CH1-Fc; VL3-CH1-VH3-CL-Fc; VH3-CH1-VL3-CL-Fc; VH3-CL-VL3-CH1-Fc; VL3-L6-VH3-L7-CH1-Fc; VH3-L6-VL3-L7-CH1-Fe; VL3-L6-VH3-L7-CL-Fc; VH3-L6-VL3-L7-CL-Fc; VL3-L6-VH3-L7-CH1-L8-CL-Fc; VH3-L6-VL3-L7-CH1-L8-CL-Fc; VL3-L6-VH3-L7-CL-L8-CH1-Fc; VH3-L6-VL3-L7-CL-L8-CH1-Fc; VL3-L6-CL-L7-VH3-L8-CH1-Fc; VL3-L6-CH1-L7-VH3-L8-CL-Fc; VH3-L6-CH1-L7-VL3-L8-CL-Fc; VH3-L6-CL-L7-VL3-L8-CH1-Fc; VL3-VH3-L6-CH1-CL-Fc; VH3-VL3-L6-CH1-CL-Fc; VL3-VH3-L6-CL-CH1-Fc; VH3-VL3-L6-CL-CH1-Fc; VL3-CL-L6-VH3-CH1-Fc; VL3-CH1-L6-VH3-CL-Fc; VH3-CH1-L6-VL3-CL-Fc; or VH3-CL-L6-VL3-CH1-Fe. In some aspects, the first polypeptide has a structure represented by VL1-VL2-VH2-VH1-CL-CH1 and the second polypeptide has a structure represented by VL3-VH3; VH3-VL3; VL3-L4-VH3; VH3-L4-VL3; VL3-VH3-Fc; VH3-VL3-Fc; VL3-L4-VH3-Fc; VH3-L4-VL3-Fc; VL3-VH3-CH1; VH3-VL3-CH1; VL3-VH3-CL; VH3-VL3-CL; VL3-VH3-CH1-CL; VH3-VL3-CH1-CL; VL3-VH3-CL-CH1; VH3-VL3-CL-CH1; VL3-CL-VH3-CH1; VL3-CH1-VH3-CL; VH3-CH1-VL3-CL; VH3-CL-VL3-CH1; VL3-L6-VH3-L7-CH1; VH3-L6-VL3-L7-CH1; VL3-L6-VH3-L7-CL; VH3-L6-VL3-L7-CL; VL3-L6-VH3-L7-CH1-L8-CL; VH3-L6-VL3-L7-CH1-L8-CL; VL3-L6-VH3-L7-CL-L8-CH1; VH3-L6-VL3-L7-CL-L8-CH1; VL3-L6-CL-L7-VH3-L8-CH1; VL3-L6-CH1-L7-VH3-L8-CL; VH3-L6-CH1-L7-VL3-L8-CL; VH3-L6-CL-L7-VL3-L8-CH1; VL3-VH3-L6-CH1-CL; VH3-VL3-L6-CH1-CL; VL3-VH3-L6-CL-CH1; VH3-VL3-L6-CL-CH1; VL3-CL-L6-VH3-CH1; VL3-CH1-L6-VH3-CL; VH3-CH1-L6-VL3-CL; VH3-CL-L6-VL3-CH1; VL3-VH3-CH1-Fc; VH3-VL3-CH1-Fc; VL3-VH3-CL-Fc; VH3-VL3-CL-Fc; VL3-VH3-CH1-CL-Fc; VH3-VL3-CH1-CL-Fc; VL3-VH3-CL-CH1-Fc; VH3-VL3-CL-CH1-Fc; VL3-CL-VH3-CH1-Fc; VL3-CH1-VH3-CL-Fc; VH3-CH1-VL3-CL-Fc; VH3-CL-VL3-CH1-Fc; VL3-L6-VH3-L7-CH1-Fc; VH3-L6-VL3-L7-CH1-Fc; VL3-L6-VH3-L7-CL-Fc; VH3-L6-VL3-L7-CL-Fe; VL3-L6-VH3-L7-CH1-L8-CL-Fc; VH3-L6-VL3-L7-CH1-L8-CL-Fc; VL3-L6-VH3-L7-CL-L8-CH1-Fc; VH3-L6-VL3-L7-CL-L8-CH1-Fc; VL3-L6-CL-L7-VH3-L8-CH1-Fc; VL3-L6-CH1-L7-VH3-L8-CL-Fc; VH3-L6-CH1-L7-VL3-L8-CL-Fc; VH3-L6-CL-L7-VL3-L8-CH1-Fc; VL3-VH3-L6-CH1-CL-Fc; VH3-VL3-L6-CH1-CL-Fc; VL3-VH3-L6-CL-CH1-Fc; VH3-VL3-L6-CL-CH1-Fc; VL3-CL-L6-VH3-CH1-Fc; VL3-CH1-L6-VH3-CL-Fc; VH3-CH1-L6-VL3-CL-Fc; or VH3-CL-L6-VL3-CH1-Fe. In some aspects, the first polypeptide has a structure represented by VH1-VH2-VL2-VL1-CL-CH1 and the second polypeptide has a structure represented by VL3-VH3; VH3-VL3; VL3-L4-VH3; VH3-L4-VL3; VL3-VH3-Fc; VH3-VL3-Fc; VL3-L4-VH3-Fc; VH3-L4-VL3-Fc; VL3-VH3-CH1; VH3-VL3-CH1; VL3-VH3-CL; VH3-VL3-CL; VL3-VH3-CH1-CL; VH3-VL3-CH1-CL; VL3-VH3-CL-CH1; VH3-VL3-CL-CH1; VL3-CL-VH3-CH1; VL3-CH1-VH3-CL; VH3-CH1-VL3-CL; VH3-CL-VL3-CH1; VL3-L6-VH3-L7-CH1; VH3-L6-VL3-L7-CH1; VL3-L6-VH3-L7-CL; VH3-L6-VL3-L7-CL; VL3-L6-VH3-L7-CH1-L8-CL; VH3-L6-VL3-L7-CH1-L8-CL; VL3-L6-VH3-L7-CL-L8-CH1; VH3-L6-VL3-L7-CL-L8-CH1; VL3-L6-CL-L7-VH3-L8-CH1; VL3-L6-CH1-L7-VH3-L8-CL; VH3-L6-CH1-L7-VL3-L8-CL; VH3-L6-CL-L7-VL3-L8-CH1; VL3-VH3-L6-CH1-CL; VH3-VL3-L6-CH1-CL; VL3-VH3-L6-CL-CH1; VH3-VL3-L6-CL-CH1; VL3-CL-L6-VH3-CH1; VL3-CH1-L6-VH3-CL; VH3-CH1-L6-VL3-CL; VH3-CL-L6-VL3-CH1; VL3-VH3-CH1-Fc; VH3-VL3-CH1-Fc; VL3-VH3-CL-Fc; VH3-VL3-CL-Fc; VL3-VH3-CH1-CL-Fc; VH3-VL3-CH1-CL-Fc; VL3-VH3-CL-CH1-Fc; VH3-VL3-CL-CH1-Fc; VL3-CL-VH3-CH1-Fc; VL3-CH1-VH3-CL-Fc; VH3-CH1-VL3-CL-Fc; VH3-CL-VL3-CH1-Fc; VL3-L6-VH3-L7-CH1-Fc; VH3-L6-VL3-L7-CH1-Fe; VL3-L6-VH3-L7-CL-Fc; VH3-L6-VL3-L7-CL-Fc; VL3-L6-VH3-L7-CH1-L8-CL-Fc; VH3-L6-VL3-L7-CH1-L8-CL-Fc; VL3-L6-VH3-L7-CL-L8-CH1-Fc; VH3-L6-VL3-L7-CL-L8-CH1-Fc; VL3-L6-CL-L7-VH3-L8-CH1-Fc; VL3-L6-CH1-L7-VH3-L8-CL-Fc; VH3-L6-CH1-L7-VL3-L8-CL-Fc; VH3-L6-CL-L7-VL3-L8-CH1-Fc; VL3-VH3-L6-CH1-CL-Fc; VH3-VL3-L6-CH1-CL-Fc; VL3-VH3-L6-CL-CH1-Fc; VH3-VL3-L6-CL-CH1-Fc; VL3-CL-L6-VH3-CH1-Fc; VL3-CH1-L6-VH3-CL-Fc; VH3-CH1-L6-VL3-CL-Fc; or VH3-CL-L6-VL3-CH1-Fe. In some aspects, the first polypeptide has a structure represented by VL1-L1-VL2-L2-VH2-L3-VH1-L4-CH1 and the second polypeptide has a structure represented by VL3-VH3; VH3-VL3; VL3-L4-VH3; VH3-L4-VL3; VL3-VH3-Fc; VH3-VL3-Fc; VL3-L4-VH3-Fc; VH3-L4-VL3-Fc; VL3-VH3-CH1; VH3-VL3-CH1; VL3-VH3-CL; VH3-VL3-CL; VL3-VH3-CH1-CL; VH3-VL3-CH1-CL; VL3-VH3-CL-CH1; VH3-VL3-CL-CH1; VL3-CL-VH3-CH1; VL3-CH1-VH3-CL; VH3-CH1-VL3-CL; VH3-CL-VL3-CH1; VL3-L6-VH3-L7-CH1; VH3-L6-VL3-L7-CH1; VL3-L6-VH3-L7-CL; VH3-L6-VL3-L7-CL; VL3-L6-VH3-L7-CH1-L8-CL; VH3-L6-VL3-L7-CH1-L8-CL; VL3-L6-VH3-L7-CL-L8-CH1; VH3-L6-VL3-L7-CL-L8-CH1; VL3-L6-CL-L7-VH3-L8-CH1; VL3-L6-CH1-L7-VH3-L8-CL; VH3-L6-CH1-L7-VL3-L8-CL; VH3-L6-CL-L7-VL3-L8-CH1; VL3-VH3-L6-CH1-CL; VH3-VL3-L6-CH1-CL; VL3-VH3-L6-CL-CH1; VH3-VL3-L6-CL-CH1; VL3-CL-L6-VH3-CH1; VL3-CH1-L6-VH3-CL; VH3-CH1-L6-VL3-CL; VH3-CL-L6-VL3-CH1; VL3-VH3-CH1-Fc; VH3-VL3-CH1-Fc; VL3-VH3-CL-Fc; VH3-VL3-CL-Fc; VL3-VH3-CH1-CL-Fc; VH3-VL3-CH1-CL-Fc; VL3-VH3-CL-CH1-Fc; VH3-VL3-CL-CH1-Fc; VL3-CL-VH3-CH1-Fc; VL3-CH1-VH3-CL-Fc; VH3-CH1-VL3-CL-Fc; VH3-CL-VL3-CH1-Fc; VL3-L6-VH3-L7-CH1-Fc; VH3-L6-VL3-L7-CH1-Fc; VL3-L6-VH3-L7-CL-Fc; VH3-L6-VL3-L7-CL-Fe; VL3-L6-VH3-L7-CH1-L8-CL-Fc; VH3-L6-VL3-L7-CH1-L8-CL-Fc; VL3-L6-VH3-L7-CL-L8-CH1-Fc; VH3-L6-VL3-L7-CL-L8-CH1-Fc; VL3-L6-CL-L7-VH3-L8-CH1-Fc; VL3-L6-CH1-L7-VH3-L8-CL-Fc; VH3-L6-CH1-L7-VL3-L8-CL-Fc; VH3-L6-CL-L7-VL3-L8-CH1-Fc; VL3-VH3-L6-CH1-CL-Fc; VH3-VL3-L6-CH1-CL-Fc; VL3-VH3-L6-CL-CH1-Fc; VH3-VL3-L6-CL-CH1-Fc; VL3-CL-L6-VH3-CH1-Fc; VL3-CH1-L6-VH3-CL-Fc; VH3-CH1-L6-VL3-CL-Fc; or VH3-CL-L6-VL3-CH1-Fc. In some aspects, the first polypeptide has a structure represented by VH1-L1-VH2-L2-VL2-L3-VL1-L4-CH1 and the second polypeptide has a structure represented by VL3-VH3; VH3-VL3; VL3-L4-VH3; VH3-L4-VL3; VL3-VH3-Fc; VH3-VL3-Fc; VL3-L4-VH3-Fc; VH3-L4-VL3-Fc; VL3-VH3-CH1; VH3-VL3-CH1; VL3-VH3-CL; VH3-VL3-CL; VL3-VH3-CH1-CL; VH3-VL3-CH1-CL; VL3-VH3-CL-CH1; VH3-VL3-CL-CH1; VL3-CL-VH3-CH1; VL3-CH1-VH3-CL; VH3-CH1-VL3-CL; VH3-CL-VL3-CH1; VL3-L6-VH3-L7-CH1; VH3-L6-VL3-L7-CH1; VL3-L6-VH3-L7-CL; VH3-L6-VL3-L7-CL; VL3-L6-VH3-L7-CH1-L8-CL; VH3-L6-VL3-L7-CH1-L8-CL; VL3-L6-VH3-L7-CL-L8-CH1; VH3-L6-VL3-L7-CL-L8-CH1; VL3-L6-CL-L7-VH3-L8-CH1; VL3-L6-CH1-L7-VH3-L8-CL; VH3-L6-CH1-L7-VL3-L8-CL; VH3-L6-CL-L7-VL3-L8-CH1; VL3-VH3-L6-CH1-CL; VH3-VL3-L6-CH1-CL; VL3-VH3-L6-CL-CH1; VH3-VL3-L6-CL-CH1; VL3-CL-L6-VH3-CH1; VL3-CH1-L6-VH3-CL; VH3-CH1-L6-VL3-CL; VH3-CL-L6-VL3-CH1; VL3-VH3-CH1-Fc; VH3-VL3-CH1-Fc; VL3-VH3-CL-Fc; VH3-VL3-CL-Fc; VL3-VH3-CH1-CL-Fc; VH3-VL3-CH1-CL-Fc; VL3-VH3-CL-CH1-Fc; VH3-VL3-CL-CH1-Fc; VL3-CL-VH3-CH1-Fe; VL3-CH1-VH3-CL-Fc; VH3-CH1-VL3-CL-Fc; VH3-CL-VL3-CH1-Fc; VL3-L6-VH3-L7-CH1-Fc; VH3-L6-VL3-L7-CH1-Fc; VL3-L6-VH3-L7-CL-Fc; VH3-L6-VL3-L7-CL-Fc; VL3-L6-VH3-L7-CH1-L8-CL-Fc; VH3-L6-VL3-L7-CH1-L8-CL-Fc; VL3-L6-VH3-L7-CL-L8-CH1-Fc; VH3-L6-VL3-L7-CL-L8-CH1-Fc; VL3-L6-CL-L7-VH3-L8-CH1-Fe; VL3-L6-CH1-L7-VH3-L8-CL-Fc; VH3-L6-CH1-L7-VL3-L8-CL-Fc; VH3-L6-CL-L7-VL3-L8-CH1-Fc; VL3-VH3-L6-CH1-CL-Fc; VH3-VL3-L6-CH1-CL-Fc; VL3-VH3-L6-CL-CH1-Fc; VH3-VL3-L6-CL-CH1-Fc; VL3-CL-L6-VH3-CH1-Fc; VL3-CH1-L6-VH3-CL-Fc; VH3-CH1-L6-VL3-CL-Fc; or VH3-CL-L6-VL3-CH1-Fc. In some aspects, the first polypeptide has a structure represented by VL1-L1-VL2-L2-VH2-L3-VH1-L4-CL and the second polypeptide has a structure represented by VL3-VH3; VH3-VL3; VL3-L4-VH3; VH3-L4-VL3; VL3-VH3-Fc; VH3-VL3-Fc; VL3-L4-VH3-Fc; VH3-L4-VL3-Fc; VL3-VH3-CH1; VH3-VL3-CH1; VL3-VH3-CL; VH3-VL3-CL; VL3-VH3-CH1-CL; VH3-VL3-CH1-CL; VL3-VH3-CL-CH1; VH3-VL3-CL-CH1; VL3-CL-VH3-CH1; VL3-CH1-VH3-CL; VH3-CH1-VL3-CL; VH3-CL-VL3-CH1; VL3-L6-VH3-L7-CH1; VH3-L6-VL3-L7-CH1; VL3-L6-VH3-L7-CL; VH3-L6-VL3-L7-CL; VL3-L6-VH3-L7-CH1-L8-CL; VH3-L6-VL3-L7-CH1-L8-CL; VL3-L6-VH3-L7-CL-L8-CH1; VH3-L6-VL3-L7-CL-L8-CH1; VL3-L6-CL-L7-VH3-L8-CH1; VL3-L6-CH1-L7-VH3-L8-CL; VH3-L6-CH1-L7-VL3-L8-CL; VH3-L6-CL-L7-VL3-L8-CH1; VL3-VH3-L6-CH1-CL; VH3-VL3-L6-CH1-CL; VL3-VH3-L6-CL-CH1; VH3-VL3-L6-CL-CH1; VL3-CL-L6-VH3-CH1; VL3-CH1-L6-VH3-CL; VH3-CH1-L6-VL3-CL; VH3-CL-L6-VL3-CH1; VL3-VH3-CH1-Fc; VH3-VL3-CH1-Fc; VL3-VH3-CL-Fc; VH3-VL3-CL-Fc; VL3-VH3-CH1-CL-Fc; VH3-VL3-CH1-CL-Fc; VL3-VH3-CL-CH1-Fc; VH3-VL3-CL-CH1-Fc; VL3-CL-VH3-CH1-Fc; VL3-CH1-VH3-CL-Fc; VH3-CH1-VL3-CL-Fc; VH3-CL-VL3-CH1-Fc; VL3-L6-VH3-L7-CH1-Fc; VH3-L6-VL3-L7-CH1-Fc; VL3-L6-VH3-L7-CL-Fc; VH3-L6-VL3-L7-CL-Fe; VL3-L6-VH3-L7-CH1-L8-CL-Fc; VH3-L6-VL3-L7-CH1-L8-CL-Fc; VL3-L6-VH3-L7-CL-L8-CH1-Fc; VH3-L6-VL3-L7-CL-L8-CH1-Fc; VL3-L6-CL-L7-VH3-L8-CH1-Fc; VL3-L6-CH1-L7-VH3-L8-CL-Fc; VH3-L6-CH1-L7-VL3-L8-CL-Fc; VH3-L6-CL-L7-VL3-L8-CH1-Fc; VL3-VH3-L6-CH1-CL-Fc; VH3-VL3-L6-CH1-CL-Fc; VL3-VH3-L6-CL-CH1-Fc; VH3-VL3-L6-CL-CH1-Fc; VL3-CL-L6-VH3-CH1-Fc; VL3-CH1-L6-VH3-CL-Fc; VH3-CH1-L6-VL3-CL-Fc; or VH3-CL-L6-VL3-CH1-Fc. In some aspects, the first polypeptide has a structure represented by VH1-L1-VH2-L2-VL2-L3-VL1-L4-CL and the second polypeptide has a structure represented by VL3-VH3; VH3-VL3; VL3-L4-VH3; VH3-L4-VL3; VL3-VH3-Fc; VH3-VL3-Fc; VL3-L4-VH3-Fc; VH3-L4-VL3-Fc; VL3-VH3-CH1; VH3-VL3-CH1; VL3-VH3-CL; VH3-VL3-CL; VL3-VH3-CH1-CL; VH3-VL3-CH1-CL; VL3-VH3-CL-CH1; VH3-VL3-CL-CH1; VL3-CL-VH3-CH1; VL3-CH1-VH3-CL; VH3-CH1-VL3-CL; VH3-CL-VL3-CH1; VL3-L6-VH3-L7-CH1; VH3-L6-VL3-L7-CH1; VL3-L6-VH3-L7-CL; VH3-L6-VL3-L7-CL; VL3-L6-VH3-L7-CH1-L8-CL; VH3-L6-VL3-L7-CH1-L8-CL; VL3-L6-VH3-L7-CL-L8-CH1; VH3-L6-VL3-L7-CL-L8-CH1; VL3-L6-CL-L7-VH3-L8-CH1; VL3-L6-CH1-L7-VH3-L8-CL; VH3-L6-CH1-L7-VL3-L8-CL; VH3-L6-CL-L7-VL3-L8-CH1; VL3-VH3-L6-CH1-CL; VH3-VL3-L6-CH1-CL; VL3-VH3-L6-CL-CH1; VH3-VL3-L6-CL-CH1; VL3-CL-L6-VH3-CH1; VL3-CH1-L6-VH3-CL; VH3-CH1-L6-VL3-CL; VH3-CL-L6-VL3-CH1; VL3-VH3-CH1-Fc; VH3-VL3-CH1-Fc; VL3-VH3-CL-Fc; VH3-VL3-CL-Fc; VL3-VH3-CH1-CL-Fc; VH3-VL3-CH1-CL-Fc; VL3-VH3-CL-CH1-Fc; VH3-VL3-CL-CH1-Fc; VL3-CL-VH3-CH1-Fe; VL3-CH1-VH3-CL-Fc; VH3-CH1-VL3-CL-Fc; VH3-CL-VL3-CH1-Fc; VL3-L6-VH3-L7-CH1-Fc; VH3-L6-VL3-L7-CH1-Fc; VL3-L6-VH3-L7-CL-Fc; VH3-L6-VL3-L7-CL-Fc; VL3-L6-VH3-L7-CH1-L8-CL-Fc; VH3-L6-VL3-L7-CH1-L8-CL-Fc; VL3-L6-VH3-L7-CL-L8-CH1-Fc; VH3-L6-VL3-L7-CL-L8-CH1-Fc; VL3-L6-CL-L7-VH3-L8-CH1-Fe; VL3-L6-CH1-L7-VH3-L8-CL-Fc; VH3-L6-CH1-L7-VL3-L8-CL-Fc; VH3-L6-CL-L7-VL3-L8-CH1-Fc; VL3-VH3-L6-CH1-CL-Fc; VH3-VL3-L6-CH1-CL-Fc; VL3-VH3-L6-CL-CH1-Fc; VH3-VL3-L6-CL-CH1-Fc; VL3-CL-L6-VH3-CH1-Fc; VL3-CH1-L6-VH3-CL-Fc; VH3-CH1-L6-VL3-CL-Fc; or VH3-CL-L6-VL3-CH1-Fc. In some aspects, the first polypeptide has a structure represented by VL1-L1-VL2-L2-VH2-L3-VH1-L4-CH1-L5-CL and the second polypeptide has a structure represented by VL3-VH3; VH3-VL3; VL3-L4-VH3; VH3-L4-VL3; VL3-VH3-Fc; VH3-VL3-Fc; VL3-L4-VH3-Fc; VH3-L4-VL3-Fc; VL3-VH3-CH1; VH3-VL3-CH1; VL3-VH3-CL; VH3-VL3-CL; VL3-VH3-CH1-CL; VH3-VL3-CH1-CL; VL3-VH3-CL-CH1; VH3-VL3-CL-CH1; VL3-CL-VH3-CH1; VL3-CH1-VH3-CL; VH3-CH1-VL3-CL; VH3-CL-VL3-CH1; VL3-L6-VH3-L7-CH1; VH3-L6-VL3-L7-CH1; VL3-L6-VH3-L7-CL; VH3-L6-VL3-L7-CL; VL3-L6-VH3-L7-CH1-L8-CL; VH3-L6-VL3-L7-CH1-L8-CL; VL3-L6-VH3-L7-CL-L8-CH1; VH3-L6-VL3-L7-CL-L8-CH1; VL3-L6-CL-L7-VH3-L8-CH1; VL3-L6-CH1-L7-VH3-L8-CL; VH3-L6-CH1-L7-VL3-L8-CL; VH3-L6-CL-L7-VL3-L8-CH1; VL3-VH3-L6-CH1-CL; VH3-VL3-L6-CH1-CL; VL3-VH3-L6-CL-CH1; VH3-VL3-L6-CL-CH1; VL3-CL-L6-VH3-CH1; VL3-CH1-L6-VH3-CL; VH3-CH1-L6-VL3-CL; VH3-CL-L6-VL3-CH1; VL3-VH3-CH1-Fc; VH3-VL3-CH1-Fc; VL3-VH3-CL-Fc; VH3-VL3-CL-Fc; VL3-VH3-CH1-CL-Fc; VH3-VL3-CH1-CL-Fc; VL3-VH3-CL-CH1-Fc; VH3-VL3-CL-CH1-Fc; VL3-CL-VH3-CH1-Fc; VL3-CH1-VH3-CL-Fc; VH3-CH1-VL3-CL-Fc; VH3-CL-VL3-CH1-Fc; VL3-L6-VH3-L7-CH1-Fc; VH3-L6-VL3-L7-CH1-Fc; VL3-L6-VH3-L7-CL-Fc; VH3-L6-VL3-L7-CL-Fe; VL3-L6-VH3-L7-CH1-L8-CL-Fc; VH3-L6-VL3-L7-CH1-L8-CL-Fc; VL3-L6-VH3-L7-CL-L8-CH1-Fc; VH3-L6-VL3-L7-CL-L8-CH1-Fc; VL3-L6-CL-L7-VH3-L8-CH1-Fc; VL3-L6-CH1-L7-VH3-L8-CL-Fc; VH3-L6-CH1-L7-VL3-L8-CL-Fc; VH3-L6-CL-L7-VL3-L8-CH1-Fc; VL3-VH3-L6-CH1-CL-Fc; VH3-VL3-L6-CH1-CL-Fc; VL3-VH3-L6-CL-CH1-Fc; VH3-VL3-L6-CL-CH1-Fc; VL3-CL-L6-VH3-CH1-Fc; VL3-CH1-L6-VH3-CL-Fc; VH3-CH1-L6-VL3-CL-Fc; or VH3-CL-L6-VL3-CH1-Fc. In some aspects, the first polypeptide has a structure represented by VH1-L1-VH2-L2-VL2-L3-VL1-L4-CH1-L5-CL and the second polypeptide has a structure represented by VL3-VH3; VH3-VL3; VL3-L4-VH3; VH3-L4-VL3; VL3-VH3-Fc; VH3-VL3-Fc; VL3-L4-VH3-Fc; VH3-L4-VL3-Fc; VL3-VH3-CH1; VH3-VL3-CH1; VL3-VH3-CL; VH3-VL3-CL; VL3-VH3-CH1-CL; VH3-VL3-CH1-CL; VL3-VH3-CL-CH1; VH3-VL3-CL-CH1; VL3-CL-VH3-CH1; VL3-CH1-VH3-CL; VH3-CH1-VL3-CL; VH3-CL-VL3-CH1; VL3-L6-VH3-L7-CH1; VH3-L6-VL3-L7-CH1; VL3-L6-VH3-L7-CL; VH3-L6-VL3-L7-CL; VL3-L6-VH3-L7-CH1-L8-CL; VH3-L6-VL3-L7-CH1-L8-CL; VL3-L6-VH3-L7-CL-L8-CH1; VH3-L6-VL3-L7-CL-L8-CH1; VL3-L6-CL-L7-VH3-L8-CH1; VL3-L6-CH1-L7-VH3-L8-CL; VH3-L6-CH1-L7-VL3-L8-CL; VH3-L6-CL-L7-VL3-L8-CH1; VL3-VH3-L6-CH1-CL; VH3-VL3-L6-CH1-CL; VL3-VH3-L6-CL-CH1; VH3-VL3-L6-CL-CH1; VL3-CL-L6-VH3-CH1; VL3-CH1-L6-VH3-CL; VH3-CH1-L6-VL3-CL; VH3-CL-L6-VL3-CH1; VL3-VH3-CH1-Fc; VH3-VL3-CH1-Fc; VL3-VH3-CL-Fc; VH3-VL3-CL-Fc; VL3-VH3-CH1-CL-Fc; VH3-VL3-CH1-CL-Fc; VL3-VH3-CL-CH1-Fc; VH3-VL3-CL-CH1-Fc; VL3-CL-VH3-CH1-Fe; VL3-CH1-VH3-CL-Fc; VH3-CH1-VL3-CL-Fc; VH3-CL-VL3-CH1-Fc; VL3-L6-VH3-L7-CH1-Fc; VH3-L6-VL3-L7-CH1-Fc; VL3-L6-VH3-L7-CL-Fc; VH3-L6-VL3-L7-CL-Fc; VL3-L6-VH3-L7-CH1-L8-CL-Fc; VH3-L6-VL3-L7-CH1-L8-CL-Fc; VL3-L6-VH3-L7-CL-L8-CH1-Fc; VH3-L6-VL3-L7-CL-L8-CH1-Fc; VL3-L6-CL-L7-VH3-L8-CH1-Fe; VL3-L6-CH1-L7-VH3-L8-CL-Fc; VH3-L6-CH1-L7-VL3-L8-CL-Fc; VH3-L6-CL-L7-VL3-L8-CH1-Fc; VL3-VH3-L6-CH1-CL-Fc; VH3-VL3-L6-CH1-CL-Fc; VL3-VH3-L6-CL-CH1-Fc; VH3-VL3-L6-CL-CH1-Fc; VL3-CL-L6-VH3-CH1-Fc; VL3-CH1-L6-VH3-CL-Fc; VH3-CH1-L6-VL3-CL-Fc; or VH3-CL-L6-VL3-CH1-Fc. In some aspects, the first polypeptide has a structure represented by VL1-L1-VL2-L2-VH2-L3-VH1-L4-CL-L5-CH1 and the second polypeptide has a structure represented by VL3-VH3; VH3-VL3; VL3-L4-VH3; VH3-L4-VL3; VL3-VH3-Fc; VH3-VL3-Fc; VL3-L4-VH3-Fc; VH3-L4-VL3-Fc; VL3-VH3-CH1; VH3-VL3-CH1; VL3-VH3-CL; VH3-VL3-CL; VL3-VH3-CH1-CL; VH3-VL3-CH1-CL; VL3-VH3-CL-CH1; VH3-VL3-CL-CH1; VL3-CL-VH3-CH1; VL3-CH1-VH3-CL; VH3-CH1-VL3-CL; VH3-CL-VL3-CH1; VL3-L6-VH3-L7-CH1; VH3-L6-VL3-L7-CH1; VL3-L6-VH3-L7-CL; VH3-L6-VL3-L7-CL; VL3-L6-VH3-L7-CH1-L8-CL; VH3-L6-VL3-L7-CH1-L8-CL; VL3-L6-VH3-L7-CL-L8-CH1; VH3-L6-VL3-L7-CL-L8-CH1; VL3-L6-CL-L7-VH3-L8-CH1; VL3-L6-CH1-L7-VH3-L8-CL; VH3-L6-CH1-L7-VL3-L8-CL; VH3-L6-CL-L7-VL3-L8-CH1; VL3-VH3-L6-CH1-CL; VH3-VL3-L6-CH1-CL; VL3-VH3-L6-CL-CH1; VH3-VL3-L6-CL-CH1; VL3-CL-L6-VH3-CH1; VL3-CH1-L6-VH3-CL; VH3-CH1-L6-VL3-CL; VH3-CL-L6-VL3-CH1; VL3-VH3-CH1-Fc; VH3-VL3-CH1-Fc; VL3-VH3-CL-Fc; VH3-VL3-CL-Fc; VL3-VH3-CH1-CL-Fc; VH3-VL3-CH1-CL-Fc; VL3-VH3-CL-CH1-Fc; VH3-VL3-CL-CH1-Fc; VL3-CL-VH3-CH1-Fc; VL3-CH1-VH3-CL-Fc; VH3-CH1-VL3-CL-Fc; VH3-CL-VL3-CH1-Fc; VL3-L6-VH3-L7-CH1-Fc; VH3-L6-VL3-L7-CH1-Fc; VL3-L6-VH3-L7-CL-Fc; VH3-L6-VL3-L7-CL-Fe; VL3-L6-VH3-L7-CH1-L8-CL-Fc; VH3-L6-VL3-L7-CH1-L8-CL-Fc; VL3-L6-VH3-L7-CL-L8-CH1-Fc; VH3-L6-VL3-L7-CL-L8-CH1-Fc; VL3-L6-CL-L7-VH3-L8-CH1-Fc; VL3-L6-CH1-L7-VH3-L8-CL-Fc; VH3-L6-CH1-L7-VL3-L8-CL-Fc; VH3-L6-CL-L7-VL3-L8-CH1-Fc; VL3-VH3-L6-CH1-CL-Fc; VH3-VL3-L6-CH1-CL-Fc; VL3-VH3-L6-CL-CH1-Fc; VH3-VL3-L6-CL-CH1-Fc; VL3-CL-L6-VH3-CH1-Fc; VL3-CH1-L6-VH3-CL-Fc; VH3-CH1-L6-VL3-CL-Fc; or VH3-CL-L6-VL3-CH1-Fc. In some aspects, the first polypeptide has a structure represented by VH1-L1-VH2-L2-VL2-L3-VL1-L4-CL-L5-CH1 and the second polypeptide has a structure represented by VL3-VH3; VH3-VL3; VL3-L4-VH3; VH3-L4-VL3; VL3-VH3-Fc; VH3-VL3-Fc; VL3-L4-VH3-Fc; VH3-L4-VL3-Fc; VL3-VH3-CH1; VH3-VL3-CH1; VL3-VH3-CL; VH3-VL3-CL; VL3-VH3-CH1-CL; VH3-VL3-CH1-CL; VL3-VH3-CL-CH1; VH3-VL3-CL-CH1; VL3-CL-VH3-CH1; VL3-CH1-VH3-CL; VH3-CH1-VL3-CL; VH3-CL-VL3-CH1; VL3-L6-VH3-L7-CH1; VH3-L6-VL3-L7-CH1; VL3-L6-VH3-L7-CL; VH3-L6-VL3-L7-CL; VL3-L6-VH3-L7-CH1-L8-CL; VH3-L6-VL3-L7-CH1-L8-CL; VL3-L6-VH3-L7-CL-L8-CH1; VH3-L6-VL3-L7-CL-L8-CH1; VL3-L6-CL-L7-VH3-L8-CH1; VL3-L6-CH1-L7-VH3-L8-CL; VH3-L6-CH1-L7-VL3-L8-CL; VH3-L6-CL-L7-VL3-L8-CH1; VL3-VH3-L6-CH1-CL; VH3-VL3-L6-CH1-CL; VL3-VH3-L6-CL-CH1; VH3-VL3-L6-CL-CH1; VL3-CL-L6-VH3-CH1; VL3-CH1-L6-VH3-CL; VH3-CH1-L6-VL3-CL; VH3-CL-L6-VL3-CH1; VL3-VH3-CH1-Fc; VH3-VL3-CH1-Fc; VL3-VH3-CL-Fc; VH3-VL3-CL-Fc; VL3-VH3-CH1-CL-Fc; VH3-VL3-CH1-CL-Fc; VL3-VH3-CL-CH1-Fc; VH3-VL3-CL-CH1-Fc; VL3-CL-VH3-CH1-Fe; VL3-CH1-VH3-CL-Fc; VH3-CH1-VL3-CL-Fc; VH3-CL-VL3-CH1-Fc; VL3-L6-VH3-L7-CH1-Fc; VH3-L6-VL3-L7-CH1-Fc; VL3-L6-VH3-L7-CL-Fc; VH3-L6-VL3-L7-CL-Fc; VL3-L6-VH3-L7-CH1-L8-CL-Fc; VH3-L6-VL3-L7-CH1-L8-CL-Fc; VL3-L6-VH3-L7-CL-L8-CH1-Fc; VH3-L6-VL3-L7-CL-L8-CH1-Fc; VL3-L6-CL-L7-VH3-L8-CH1-Fe; VL3-L6-CH1-L7-VH3-L8-CL-Fc; VH3-L6-CH1-L7-VL3-L8-CL-Fc; VH3-L6-CL-L7-VL3-L8-CH1-Fc; VL3-VH3-L6-CH1-CL-Fc; VH3-VL3-L6-CH1-CL-Fc; VL3-VH3-L6-CL-CH1-Fc; VH3-VL3-L6-CL-CH1-Fc; VL3-CL-L6-VH3-CH1-Fc; VL3-CH1-L6-VH3-CL-Fc; VH3-CH1-L6-VL3-CL-Fc; or VH3-CL-L6-VL3-CH1-Fc. In some aspects, the first polypeptide has a structure represented by VL1-VL2-VH2-VH1-CH1-Fc and the second polypeptide has a structure represented by VL3-VH3; VH3-VL3; VL3-L4-VH3; VH3-L4-VL3; VL3-VH3-Fc; VH3-VL3-Fc; VL3-L4-VH3-Fc; VH3-L4-VL3-Fc; VL3-VH3-CH1; VH3-VL3-CH1; VL3-VH3-CL; VH3-VL3-CL; VL3-VH3-CH1-CL; VH3-VL3-CH1-CL; VL3-VH3-CL-CH1; VH3-VL3-CL-CH1; VL3-CL-VH3-CH1; VL3-CH1-VH3-CL; VH3-CH1-VL3-CL; VH3-CL-VL3-CH1; VL3-L6-VH3-L7-CH1; VH3-L6-VL3-L7-CH1; VL3-L6-VH3-L7-CL; VH3-L6-VL3-L7-CL; VL3-L6-VH3-L7-CH1-L8-CL; VH3-L6-VL3-L7-CH1-L8-CL; VL3-L6-VH3-L7-CL-L8-CH1; VH3-L6-VL3-L7-CL-L8-CH1; VL3-L6-CL-L7-VH3-L8-CH1; VL3-L6-CH1-L7-VH3-L8-CL; VH3-L6-CH1-L7-VL3-L8-CL; VH3-L6-CL-L7-VL3-L8-CH1; VL3-VH3-L6-CH1-CL; VH3-VL3-L6-CH1-CL; VL3-VH3-L6-CL-CH1; VH3-VL3-L6-CL-CH1; VL3-CL-L6-VH3-CH1; VL3-CH1-L6-VH3-CL; VH3-CH1-L6-VL3-CL; VH3-CL-L6-VL3-CH1; VL3-VH3-CH1-Fc; VH3-VL3-CH1-Fc; VL3-VH3-CL-Fc; VH3-VL3-CL-Fc; VL3-VH3-CH1-CL-Fc; VH3-VL3-CH1-CL-Fc; VL3-VH3-CL-CH1-Fc; VH3-VL3-CL-CH1-Fc; VL3-CL-VH3-CH1-Fc; VL3-CH1-VH3-CL-Fc; VH3-CH1-VL3-CL-Fc; VH3-CL-VL3-CH1-Fc; VL3-L6-VH3-L7-CH1-Fc; VH3-L6-VL3-L7-CH1-Fc; VL3-L6-VH3-L7-CL-Fc; VH3-L6-VL3-L7-CL-Fe; VL3-L6-VH3-L7-CH1-L8-CL-Fc; VH3-L6-VL3-L7-CH1-L8-CL-Fc; VL3-L6-VH3-L7-CL-L8-CH1-Fc; VH3-L6-VL3-L7-CL-L8-CH1-Fc; VL3-L6-CL-L7-VH3-L8-CH1-Fc; VL3-L6-CH1-L7-VH3-L8-CL-Fc; VH3-L6-CH1-L7-VL3-L8-CL-Fc; VH3-L6-CL-L7-VL3-L8-CH1-Fc; VL3-VH3-L6-CH1-CL-Fc; VH3-VL3-L6-CH1-CL-Fc; VL3-VH3-L6-CL-CH1-Fc; VH3-VL3-L6-CL-CH1-Fc; VL3-CL-L6-VH3-CH1-Fc; VL3-CH1-L6-VH3-CL-Fc; VH3-CH1-L6-VL3-CL-Fc; or VH3-CL-L6-VL3-CH1-Fe. In some aspects, the first polypeptide has a structure represented by VH1-VH2-VL2-VL1-CH1-Fc and the second polypeptide has a structure represented by VL3-VH3; VH3-VL3; VL3-L4-VH3; VH3-L4-VL3; VL3-VH3-Fc; VH3-VL3-Fc; VL3-L4-VH3-Fc; VH3-L4-VL3-Fc; VL3-VH3-CH1; VH3-VL3-CH1; VL3-VH3-CL; VH3-VL3-CL; VL3-VH3-CH1-CL; VH3-VL3-CH1-CL; VL3-VH3-CL-CH1; VH3-VL3-CL-CH1; VL3-CL-VH3-CH1; VL3-CH1-VH3-CL; VH3-CH1-VL3-CL; VH3-CL-VL3-CH1; VL3-L6-VH3-L7-CH1; VH3-L6-VL3-L7-CH1; VL3-L6-VH3-L7-CL; VH3-L6-VL3-L7-CL; VL3-L6-VH3-L7-CH1-L8-CL; VH3-L6-VL3-L7-CH1-L8-CL; VL3-L6-VH3-L7-CL-L8-CH1; VH3-L6-VL3-L7-CL-L8-CH1; VL3-L6-CL-L7-VH3-L8-CH1; VL3-L6-CH1-L7-VH3-L8-CL; VH3-L6-CH1-L7-VL3-L8-CL; VH3-L6-CL-L7-VL3-L8-CH1; VL3-VH3-L6-CH1-CL; VH3-VL3-L6-CH1-CL; VL3-VH3-L6-CL-CH1; VH3-VL3-L6-CL-CH1; VL3-CL-L6-VH3-CH1; VL3-CH1-L6-VH3-CL; VH3-CH1-L6-VL3-CL; VH3-CL-L6-VL3-CH1; VL3-VH3-CH1-Fc; VH3-VL3-CH1-Fc; VL3-VH3-CL-Fc; VH3-VL3-CL-Fc; VL3-VH3-CH1-CL-Fc; VH3-VL3-CH1-CL-Fc; VL3-VH3-CL-CH1-Fc; VH3-VL3-CL-CH1-Fc; VL3-CL-VH3-CH1-Fc; VL3-CH1-VH3-CL-Fc; VH3-CH1-VL3-CL-Fc; VH3-CL-VL3-CH1-Fc; VL3-L6-VH3-L7-CH1-Fc; VH3-L6-VL3-L7-CH1-Fe; VL3-L6-VH3-L7-CL-Fc; VH3-L6-VL3-L7-CL-Fc; VL3-L6-VH3-L7-CH1-L8-CL-Fc; VH3-L6-VL3-L7-CH1-L8-CL-Fc; VL3-L6-VH3-L7-CL-L8-CH1-Fc; VH3-L6-VL3-L7-CL-L8-CH1-Fc; VL3-L6-CL-L7-VH3-L8-CH1-Fc; VL3-L6-CH1-L7-VH3-L8-CL-Fc; VH3-L6-CH1-L7-VL3-L8-CL-Fc; VH3-L6-CL-L7-VL3-L8-CH1-Fc; VL3-VH3-L6-CH1-CL-Fc; VH3-VL3-L6-CH1-CL-Fc; VL3-VH3-L6-CL-CH1-Fc; VH3-VL3-L6-CL-CH1-Fc; VL3-CL-L6-VH3-CH1-Fc; VL3-CH1-L6-VH3-CL-Fc; VH3-CH1-L6-VL3-CL-Fc; or VH3-CL-L6-VL3-CH1-Fe. In some aspects, the first polypeptide has a structure represented by VL1-VL2-VH2-VH1-CL-Fc and the second polypeptide has a structure represented by VL3-VH3; VH3-VL3; VL3-L4-VH3; VH3-L4-VL3; VL3-VH3-Fc; VH3-VL3-Fc; VL3-L4-VH3-Fc; VH3-L4-VL3-Fc; VL3-VH3-CH1; VH3-VL3-CH1; VL3-VH3-CL; VH3-VL3-CL; VL3-VH3-CH1-CL; VH3-VL3-CH1-CL; VL3-VH3-CL-CH1; VH3-VL3-CL-CH1; VL3-CL-VH3-CH1; VL3-CH1-VH3-CL; VH3-CH1-VL3-CL; VH3-CL-VL3-CH1; VL3-L6-VH3-L7-CH1; VH3-L6-VL3-L7-CH1; VL3-L6-VH3-L7-CL; VH3-L6-VL3-L7-CL; VL3-L6-VH3-L7-CH1-L8-CL; VH3-L6-VL3-L7-CH1-L8-CL; VL3-L6-VH3-L7-CL-L8-CH1; VH3-L6-VL3-L7-CL-L8-CH1; VL3-L6-CL-L7-VH3-L8-CH1; VL3-L6-CH1-L7-VH3-L8-CL; VH3-L6-CH1-L7-VL3-L8-CL; VH3-L6-CL-L7-VL3-L8-CH1; VL3-VH3-L6-CH1-CL; VH3-VL3-L6-CH1-CL; VL3-VH3-L6-CL-CH1; VH3-VL3-L6-CL-CH1; VL3-CL-L6-VH3-CH1; VL3-CH1-L6-VH3-CL; VH3-CH1-L6-VL3-CL; VH3-CL-L6-VL3-CH1; VL3-VH3-CH1-Fc; VH3-VL3-CH1-Fc; VL3-VH3-CL-Fc; VH3-VL3-CL-Fc; VL3-VH3-CH1-CL-Fc; VH3-VL3-CH1-CL-Fc; VL3-VH3-CL-CH1-Fc; VH3-VL3-CL-CH1-Fc; VL3-CL-VH3-CH1-Fc; VL3-CH1-VH3-CL-Fc; VH3-CH1-VL3-CL-Fc; VH3-CL-VL3-CH1-Fc; VL3-L6-VH3-L7-CH1-Fc; VH3-L6-VL3-L7-CH1-Fc; VL3-L6-VH3-L7-CL-Fc; VH3-L6-VL3-L7-CL-Fe; VL3-L6-VH3-L7-CH1-L8-CL-Fc; VH3-L6-VL3-L7-CH1-L8-CL-Fc; VL3-L6-VH3-L7-CL-L8-CH1-Fc; VH3-L6-VL3-L7-CL-L8-CH1-Fc; VL3-L6-CL-L7-VH3-L8-CH1-Fc; VL3-L6-CH1-L7-VH3-L8-CL-Fc; VH3-L6-CH1-L7-VL3-L8-CL-Fc; VH3-L6-CL-L7-VL3-L8-CH1-Fc; VL3-VH3-L6-CH1-CL-Fc; VH3-VL3-L6-CH1-CL-Fc; VL3-VH3-L6-CL-CH1-Fc; VH3-VL3-L6-CL-CH1-Fc; VL3-CL-L6-VH3-CH1-Fc; VL3-CH1-L6-VH3-CL-Fc; VH3-CH1-L6-VL3-CL-Fc; or VH3-CL-L6-VL3-CH1-Fe. In some aspects, the first polypeptide has a structure represented by VH1-VH2-VL2-VL1-CL-Fc and the second polypeptide has a structure represented by VL3-VH3; VH3-VL3; VL3-L4-VH3; VH3-L4-VL3; VL3-VH3-Fc; VH3-VL3-Fc; VL3-L4-VH3-Fc; VH3-L4-VL3-Fc; VL3-VH3-CH1; VH3-VL3-CH1; VL3-VH3-CL; VH3-VL3-CL; VL3-VH3-CH1-CL; VH3-VL3-CH1-CL; VL3-VH3-CL-CH1; VH3-VL3-CL-CH1; VL3-CL-VH3-CH1; VL3-CH1-VH3-CL; VH3-CH1-VL3-CL; VH3-CL-VL3-CH1; VL3-L6-VH3-L7-CH1; VH3-L6-VL3-L7-CH1; VL3-L6-VH3-L7-CL; VH3-L6-VL3-L7-CL; VL3-L6-VH3-L7-CH1-L8-CL; VH3-L6-VL3-L7-CH1-L8-CL; VL3-L6-VH3-L7-CL-L8-CH1; VH3-L6-VL3-L7-CL-L8-CH1; VL3-L6-CL-L7-VH3-L8-CH1; VL3-L6-CH1-L7-VH3-L8-CL; VH3-L6-CH1-L7-VL3-L8-CL; VH3-L6-CL-L7-VL3-L8-CH1; VL3-VH3-L6-CH1-CL; VH3-VL3-L6-CH1-CL; VL3-VH3-L6-CL-CH1; VH3-VL3-L6-CL-CH1; VL3-CL-L6-VH3-CH1; VL3-CH1-L6-VH3-CL; VH3-CH1-L6-VL3-CL; VH3-CL-L6-VL3-CH1; VL3-VH3-CH1-Fc; VH3-VL3-CH1-Fc; VL3-VH3-CL-Fc; VH3-VL3-CL-Fc; VL3-VH3-CH1-CL-Fc; VH3-VL3-CH1-CL-Fc; VL3-VH3-CL-CH1-Fc; VH3-VL3-CL-CH1-Fc; VL3-CL-VH3-CH1-Fc; VL3-CH1-VH3-CL-Fc; VH3-CH1-VL3-CL-Fc; VH3-CL-VL3-CH1-Fc; VL3-L6-VH3-L7-CH1-Fc; VH3-L6-VL3-L7-CH1-Fe; VL3-L6-VH3-L7-CL-Fc; VH3-L6-VL3-L7-CL-Fc; VL3-L6-VH3-L7-CH1-L8-CL-Fc; VH3-L6-VL3-L7-CH1-L8-CL-Fc; VL3-L6-VH3-L7-CL-L8-CH1-Fc; VH3-L6-VL3-L7-CL-L8-CH1-Fc; VL3-L6-CL-L7-VH3-L8-CH1-Fc; VL3-L6-CH1-L7-VH3-L8-CL-Fc; VH3-L6-CH1-L7-VL3-L8-CL-Fc; VH3-L6-CL-L7-VL3-L8-CH1-Fc; VL3-VH3-L6-CH1-CL-Fc; VH3-VL3-L6-CH1-CL-Fc; VL3-VH3-L6-CL-CH1-Fc; VH3-VL3-L6-CL-CH1-Fc; VL3-CL-L6-VH3-CH1-Fc; VL3-CH1-L6-VH3-CL-Fc; VH3-CH1-L6-VL3-CL-Fc; or VH3-CL-L6-VL3-CH1-Fc. In some aspects, the first polypeptide has a structure represented by VL1-VL2-VH2-VH1-CH1-CL-Fc and the second polypeptide has a structure represented by VL3-VH3; VH3-VL3; VL3-L4-VH3; VH3-L4-VL3; VL3-VH3-Fc; VH3-VL3-Fc; VL3-L4-VH3-Fc; VH3-L4-VL3-Fc; VL3-VH3-CH1; VH3-VL3-CH1; VL3-VH3-CL; VH3-VL3-CL; VL3-VH3-CH1-CL; VH3-VL3-CH1-CL; VL3-VH3-CL-CH1; VH3-VL3-CL-CH1; VL3-CL-VH3-CH1; VL3-CH1-VH3-CL; VH3-CH1-VL3-CL; VH3-CL-VL3-CH1; VL3-L6-VH3-L7-CH1; VH3-L6-VL3-L7-CH1; VL3-L6-VH3-L7-CL; VH3-L6-VL3-L7-CL; VL3-L6-VH3-L7-CH1-L8-CL; VH3-L6-VL3-L7-CH1-L8-CL; VL3-L6-VH3-L7-CL-L8-CH1; VH3-L6-VL3-L7-CL-L8-CH1; VL3-L6-CL-L7-VH3-L8-CH1; VL3-L6-CH1-L7-VH3-L8-CL; VH3-L6-CH1-L7-VL3-L8-CL; VH3-L6-CL-L7-VL3-L8-CH1; VL3-VH3-L6-CH1-CL; VH3-VL3-L6-CH1-CL; VL3-VH3-L6-CL-CH1; VH3-VL3-L6-CL-CH1; VL3-CL-L6-VH3-CH1; VL3-CH1-L6-VH3-CL; VH3-CH1-L6-VL3-CL; VH3-CL-L6-VL3-CH1; VL3-VH3-CH1-Fc; VH3-VL3-CH1-Fc; VL3-VH3-CL-Fc; VH3-VL3-CL-Fc; VL3-VH3-CH1-CL-Fc; VH3-VL3-CH1-CL-Fc; VL3-VH3-CL-CH1-Fc; VH3-VL3-CL-CH1-Fc; VL3-CL-VH3-CH1-Fc; VL3-CH1-VH3-CL-Fc; VH3-CH1-VL3-CL-Fc; VH3-CL-VL3-CH1-Fc; VL3-L6-VH3-L7-CH1-Fc; VH3-L6-VL3-L7-CH1-Fc; VL3-L6-VH3-L7-CL-Fc; VH3-L6-VL3-L7-CL-Fe; VL3-L6-VH3-L7-CH1-L8-CL-Fc; VH3-L6-VL3-L7-CH1-L8-CL-Fc; VL3-L6-VH3-L7-CL-L8-CH1-Fc; VH3-L6-VL3-L7-CL-L8-CH1-Fc; VL3-L6-CL-L7-VH3-L8-CH1-Fc; VL3-L6-CH1-L7-VH3-L8-CL-Fc; VH3-L6-CH1-L7-VL3-L8-CL-Fc; VH3-L6-CL-L7-VL3-L8-CH1-Fc; VL3-VH3-L6-CH1-CL-Fc; VH3-VL3-L6-CH1-CL-Fc; VL3-VH3-L6-CL-CH1-Fc; VH3-VL3-L6-CL-CH1-Fc; VL3-CL-L6-VH3-CH1-Fc; VL3-CH1-L6-VH3-CL-Fc; VH3-CH1-L6-VL3-CL-Fc; or VH3-CL-L6-VL3-CH1-Fe. In some aspects, the first polypeptide has a structure represented by VH1-VH2-VL2-VL1-CH1-CL-Fc and the second polypeptide has a structure represented by VL3-VH3; VH3-VL3; VL3-L4-VH3; VH3-L4-VL3; VL3-VH3-Fc; VH3-VL3-Fc; VL3-L4-VH3-Fc; VH3-L4-VL3-Fc; VL3-VH3-CH1; VH3-VL3-CH1; VL3-VH3-CL; VH3-VL3-CL; VL3-VH3-CH1-CL; VH3-VL3-CH1-CL; VL3-VH3-CL-CH1; VH3-VL3-CL-CH1; VL3-CL-VH3-CH1; VL3-CH1-VH3-CL; VH3-CH1-VL3-CL; VH3-CL-VL3-CH1; VL3-L6-VH3-L7-CH1; VH3-L6-VL3-L7-CH1; VL3-L6-VH3-L7-CL; VH3-L6-VL3-L7-CL; VL3-L6-VH3-L7-CH1-L8-CL; VH3-L6-VL3-L7-CH1-L8-CL; VL3-L6-VH3-L7-CL-L8-CH1; VH3-L6-VL3-L7-CL-L8-CH1; VL3-L6-CL-L7-VH3-L8-CH1; VL3-L6-CH1-L7-VH3-L8-CL; VH3-L6-CH1-L7-VL3-L8-CL; VH3-L6-CL-L7-VL3-L8-CH1; VL3-VH3-L6-CH1-CL; VH3-VL3-L6-CH1-CL; VL3-VH3-L6-CL-CH1; VH3-VL3-L6-CL-CH1; VL3-CL-L6-VH3-CH1; VL3-CH1-L6-VH3-CL; VH3-CH1-L6-VL3-CL; VH3-CL-L6-VL3-CH1; VL3-VH3-CH1-Fc; VH3-VL3-CH1-Fc; VL3-VH3-CL-Fc; VH3-VL3-CL-Fc; VL3-VH3-CH1-CL-Fc; VH3-VL3-CH1-CL-Fc; VL3-VH3-CL-CH1-Fc; VH3-VL3-CL-CH1-Fc; VL3-CL-VH3-CH1-Fc; VL3-CH1-VH3-CL-Fc; VH3-CH1-VL3-CL-Fc; VH3-CL-VL3-CH1-Fc; VL3-L6-VH3-L7-CH1-Fc; VH3-L6-VL3-L7-CH1-Fe; VL3-L6-VH3-L7-CL-Fc; VH3-L6-VL3-L7-CL-Fc; VL3-L6-VH3-L7-CH1-L8-CL-Fc; VH3-L6-VL3-L7-CH1-L8-CL-Fc; VL3-L6-VH3-L7-CL-L8-CH1-Fc; VH3-L6-VL3-L7-CL-L8-CH1-Fc; VL3-L6-CL-L7-VH3-L8-CH1-Fc; VL3-L6-CH1-L7-VH3-L8-CL-Fc; VH3-L6-CH1-L7-VL3-L8-CL-Fc; VH3-L6-CL-L7-VL3-L8-CH1-Fc; VL3-VH3-L6-CH1-CL-Fc; VH3-VL3-L6-CH1-CL-Fc; VL3-VH3-L6-CL-CH1-Fc; VH3-VL3-L6-CL-CH1-Fc; VL3-CL-L6-VH3-CH1-Fc; VL3-CH1-L6-VH3-CL-Fc; VH3-CH1-L6-VL3-CL-Fc; or VH3-CL-L6-VL3-CH1-Fe. In some aspects, the first polypeptide has a structure represented by VL1-VL2-VH2-VH1-CL-CH1-Fc and the second polypeptide has a structure represented by VL3-VH3; VH3-VL3; VL3-L4-VH3; VH3-L4-VL3; VL3-VH3-Fc; VH3-VL3-Fc; VL3-L4-VH3-Fc; VH3-L4-VL3-Fc; VL3-VH3-CH1; VH3-VL3-CH1; VL3-VH3-CL; VH3-VL3-CL; VL3-VH3-CH1-CL; VH3-VL3-CH1-CL; VL3-VH3-CL-CH1; VH3-VL3-CL-CH1; VL3-CL-VH3-CH1; VL3-CH1-VH3-CL; VH3-CH1-VL3-CL; VH3-CL-VL3-CH1; VL3-L6-VH3-L7-CH1; VH3-L6-VL3-L7-CH1; VL3-L6-VH3-L7-CL; VH3-L6-VL3-L7-CL; VL3-L6-VH3-L7-CH1-L8-CL; VH3-L6-VL3-L7-CH1-L8-CL; VL3-L6-VH3-L7-CL-L8-CH1; VH3-L6-VL3-L7-CL-L8-CH1; VL3-L6-CL-L7-VH3-L8-CH1; VL3-L6-CH1-L7-VH3-L8-CL; VH3-L6-CH1-L7-VL3-L8-CL; VH3-L6-CL-L7-VL3-L8-CH1; VL3-VH3-L6-CH1-CL; VH3-VL3-L6-CH1-CL; VL3-VH3-L6-CL-CH1; VH3-VL3-L6-CL-CH1; VL3-CL-L6-VH3-CH1; VL3-CH1-L6-VH3-CL; VH3-CH1-L6-VL3-CL; VH3-CL-L6-VL3-CH1; VL3-VH3-CH1-Fc; VH3-VL3-CH1-Fc; VL3-VH3-CL-Fc; VH3-VL3-CL-Fc; VL3-VH3-CH1-CL-Fc; VH3-VL3-CH1-CL-Fc; VL3-VH3-CL-CH1-Fc; VH3-VL3-CL-CH1-Fc; VL3-CL-VH3-CH1-Fc; VL3-CH1-VH3-CL-Fc; VH3-CH1-VL3-CL-Fc; VH3-CL-VL3-CH1-Fc; VL3-L6-VH3-L7-CH1-Fc; VH3-L6-VL3-L7-CH1-Fc; VL3-L6-VH3-L7-CL-Fc; VH3-L6-VL3-L7-CL-Fe; VL3-L6-VH3-L7-CH1-L8-CL-Fc; VH3-L6-VL3-L7-CH1-L8-CL-Fc; VL3-L6-VH3-L7-CL-L8-CH1-Fc; VH3-L6-VL3-L7-CL-L8-CH1-Fc; VL3-L6-CL-L7-VH3-L8-CH1-Fc; VL3-L6-CH1-L7-VH3-L8-CL-Fc; VH3-L6-CH1-L7-VL3-L8-CL-Fc; VH3-L6-CL-L7-VL3-L8-CH1-Fc; VL3-VH3-L6-CH1-CL-Fc; VH3-VL3-L6-CH1-CL-Fc; VL3-VH3-L6-CL-CH1-Fc; VH3-VL3-L6-CL-CH1-Fc; VL3-CL-L6-VH3-CH1-Fc; VL3-CH1-L6-VH3-CL-Fc; VH3-CH1-L6-VL3-CL-Fc; or VH3-CL-L6-VL3-CH1-Fe. In some aspects, the first polypeptide has a structure represented by VH1-VH2-VL2-VL1-CL-CH1-Fc and the second polypeptide has a structure represented by VL3-VH3; VH3-VL3; VL3-L4-VH3; VH3-L4-VL3; VL3-VH3-Fc; VH3-VL3-Fc; VL3-L4-VH3-Fc; VH3-L4-VL3-Fc; VL3-VH3-CH1; VH3-VL3-CH1; VL3-VH3-CL; VH3-VL3-CL; VL3-VH3-CH1-CL; VH3-VL3-CH1-CL; VL3-VH3-CL-CH1; VH3-VL3-CL-CH1; VL3-CL-VH3-CH1; VL3-CH1-VH3-CL; VH3-CH1-VL3-CL; VH3-CL-VL3-CH1; VL3-L6-VH3-L7-CH1; VH3-L6-VL3-L7-CH1; VL3-L6-VH3-L7-CL; VH3-L6-VL3-L7-CL; VL3-L6-VH3-L7-CH1-L8-CL; VH3-L6-VL3-L7-CH1-L8-CL; VL3-L6-VH3-L7-CL-L8-CH1; VH3-L6-VL3-L7-CL-L8-CH1; VL3-L6-CL-L7-VH3-L8-CH1; VL3-L6-CH1-L7-VH3-L8-CL; VH3-L6-CH1-L7-VL3-L8-CL; VH3-L6-CL-L7-VL3-L8-CH1; VL3-VH3-L6-CH1-CL; VH3-VL3-L6-CH1-CL; VL3-VH3-L6-CL-CH1; VH3-VL3-L6-CL-CH1; VL3-CL-L6-VH3-CH1; VL3-CH1-L6-VH3-CL; VH3-CH1-L6-VL3-CL; VH3-CL-L6-VL3-CH1; VL3-VH3-CH1-Fc; VH3-VL3-CH1-Fc; VL3-VH3-CL-Fc; VH3-VL3-CL-Fc; VL3-VH3-CH1-CL-Fc; VH3-VL3-CH1-CL-Fc; VL3-VH3-CL-CH1-Fc; VH3-VL3-CL-CH1-Fc; VL3-CL-VH3-CH1-Fc; VL3-CH1-VH3-CL-Fc; VH3-CH1-VL3-CL-Fc; VH3-CL-VL3-CH1-Fc; VL3-L6-VH3-L7-CH1-Fc; VH3-L6-VL3-L7-CH1-Fe; VL3-L6-VH3-L7-CL-Fc; VH3-L6-VL3-L7-CL-Fc; VL3-L6-VH3-L7-CH1-L8-CL-Fc; VH3-L6-VL3-L7-CH1-L8-CL-Fc; VL3-L6-VH3-L7-CL-L8-CH1-Fc; VH3-L6-VL3-L7-CL-L8-CH1-Fc; VL3-L6-CL-L7-VH3-L8-CH1-Fc; VL3-L6-CH1-L7-VH3-L8-CL-Fc; VH3-L6-CH1-L7-VL3-L8-CL-Fc; VH3-L6-CL-L7-VL3-L8-CH1-Fc; VL3-VH3-L6-CH1-CL-Fc; VH3-VL3-L6-CH1-CL-Fc; VL3-VH3-L6-CL-CH1-Fc; VH3-VL3-L6-CL-CH1-Fc; VL3-CL-L6-VH3-CH1-Fc; VL3-CH1-L6-VH3-CL-Fc; VH3-CH1-L6-VL3-CL-Fc; or VH3-CL-L6-VL3-CH1-Fe. In some aspects, the first polypeptide has a structure represented by VL1-L1-VL2-L2-VH2-L3-VH1-L4-CH1-Fc and the second polypeptide has a structure represented by VL3-VH3; VH3-VL3; VL3-L4-VH3; VH3-L4-VL3; VL3-VH3-Fc; VH3-VL3-Fc; VL3-L4-VH3-Fc; VH3-L4-VL3-Fc; VL3-VH3-CH1; VH3-VL3-CH1; VL3-VH3-CL; VH3-VL3-CL; VL3-VH3-CH1-CL; VH3-VL3-CH1-CL; VL3-VH3-CL-CH1; VH3-VL3-CL-CH1; VL3-CL-VH3-CH1; VL3-CH1-VH3-CL; VH3-CH1-VL3-CL; VH3-CL-VL3-CH1; VL3-L6-VH3-L7-CH1; VH3-L6-VL3-L7-CH1; VL3-L6-VH3-L7-CL; VH3-L6-VL3-L7-CL; VL3-L6-VH3-L7-CH1-L8-CL; VH3-L6-VL3-L7-CH1-L8-CL; VL3-L6-VH3-L7-CL-L8-CH1; VH3-L6-VL3-L7-CL-L8-CH1; VL3-L6-CL-L7-VH3-L8-CH1; VL3-L6-CH1-L7-VH3-L8-CL; VH3-L6-CH1-L7-VL3-L8-CL; VH3-L6-CL-L7-VL3-L8-CH1; VL3-VH3-L6-CH1-CL; VH3-VL3-L6-CH1-CL; VL3-VH3-L6-CL-CH1; VH3-VL3-L6-CL-CH1; VL3-CL-L6-VH3-CH1; VL3-CH1-L6-VH3-CL; VH3-CH1-L6-VL3-CL; VH3-CL-L6-VL3-CH1; VL3-VH3-CH1-Fc; VH3-VL3-CH1-Fc; VL3-VH3-CL-Fc; VH3-VL3-CL-Fc; VL3-VH3-CH1-CL-Fc; VH3-VL3-CH1-CL-Fc; VL3-VH3-CL-CH1-Fc; VH3-VL3-CL-CH1-Fc; VL3-CL-VH3-CH1-Fc; VL3-CH1-VH3-CL-Fc; VH3-CH1-VL3-CL-Fc; VH3-CL-VL3-CH1-Fc; VL3-L6-VH3-L7-CH1-Fc; VH3-L6-VL3-L7-CH1-Fc; VL3-L6-VH3-L7-CL-Fc; VH3-L6-VL3-L7-CL-Fe; VL3-L6-VH3-L7-CH1-L8-CL-Fc; VH3-L6-VL3-L7-CH1-L8-CL-Fc; VL3-L6-VH3-L7-CL-L8-CH1-Fc; VH3-L6-VL3-L7-CL-L8-CH1-Fc; VL3-L6-CL-L7-VH3-L8-CH1-Fc; VL3-L6-CH1-L7-VH3-L8-CL-Fc; VH3-L6-CH1-L7-VL3-L8-CL-Fc; VH3-L6-CL-L7-VL3-L8-CH1-Fc; VL3-VH3-L6-CH1-CL-Fc; VH3-VL3-L6-CH1-CL-Fc; VL3-VH3-L6-CL-CH1-Fc; VH3-VL3-L6-CL-CH1-Fc; VL3-CL-L6-VH3-CH1-Fc; VL3-CH1-L6-VH3-CL-Fc; VH3-CH1-L6-VL3-CL-Fc; or VH3-CL-L6-VL3-CH1-Fc. In some aspects, the first polypeptide has a structure represented by VH1-L1-VH2-L2-VL2-L3-VL1-L4-CH1-Fc and the second polypeptide has a structure represented by VL3-VH3; VH3-VL3; VL3-L4-VH3; VH3-L4-VL3; VL3-VH3-Fc; VH3-VL3-Fc; VL3-L4-VH3-Fc; VH3-L4-VL3-Fc; VL3-VH3-CH1; VH3-VL3-CH1; VL3-VH3-CL; VH3-VL3-CL; VL3-VH3-CH1-CL; VH3-VL3-CH1-CL; VL3-VH3-CL-CH1; VH3-VL3-CL-CH1; VL3-CL-VH3-CH1; VL3-CH1-VH3-CL; VH3-CH1-VL3-CL; VH3-CL-VL3-CH1; VL3-L6-VH3-L7-CH1; VH3-L6-VL3-L7-CH1; VL3-L6-VH3-L7-CL; VH3-L6-VL3-L7-CL; VL3-L6-VH3-L7-CH1-L8-CL; VH3-L6-VL3-L7-CH1-L8-CL; VL3-L6-VH3-L7-CL-L8-CH1; VH3-L6-VL3-L7-CL-L8-CH1; VL3-L6-CL-L7-VH3-L8-CH1; VL3-L6-CH1-L7-VH3-L8-CL; VH3-L6-CH1-L7-VL3-L8-CL; VH3-L6-CL-L7-VL3-L8-CH1; VL3-VH3-L6-CH1-CL; VH3-VL3-L6-CH1-CL; VL3-VH3-L6-CL-CH1; VH3-VL3-L6-CL-CH1; VL3-CL-L6-VH3-CH1; VL3-CH1-L6-VH3-CL; VH3-CH1-L6-VL3-CL; VH3-CL-L6-VL3-CH1; VL3-VH3-CH1-Fc; VH3-VL3-CH1-Fc; VL3-VH3-CL-Fc; VH3-VL3-CL-Fc; VL3-VH3-CH1-CL-Fc; VH3-VL3-CH1-CL-Fc; VL3-VH3-CL-CH1-Fc; VH3-VL3-CL-CH1-Fc; VL3-CL-VH3-CH1-Fe; VL3-CH1-VH3-CL-Fc; VH3-CH1-VL3-CL-Fc; VH3-CL-VL3-CH1-Fc; VL3-L6-VH3-L7-CH1-Fc; VH3-L6-VL3-L7-CH1-Fc; VL3-L6-VH3-L7-CL-Fc; VH3-L6-VL3-L7-CL-Fc; VL3-L6-VH3-L7-CH1-L8-CL-Fc; VH3-L6-VL3-L7-CH1-L8-CL-Fc; VL3-L6-VH3-L7-CL-L8-CH1-Fc; VH3-L6-VL3-L7-CL-L8-CH1-Fc; VL3-L6-CL-L7-VH3-L8-CH1-Fe; VL3-L6-CH1-L7-VH3-L8-CL-Fc; VH3-L6-CH1-L7-VL3-L8-CL-Fc; VH3-L6-CL-L7-VL3-L8-CH1-Fc; VL3-VH3-L6-CH1-CL-Fc; VH3-VL3-L6-CH1-CL-Fc; VL3-VH3-L6-CL-CH1-Fc; VH3-VL3-L6-CL-CH1-Fc; VL3-CL-L6-VH3-CH1-Fc; VL3-CH1-L6-VH3-CL-Fc; VH3-CH1-L6-VL3-CL-Fc; or VH3-CL-L6-VL3-CH1-Fc. In some aspects, the first polypeptide has a structure represented by VL1-L1-VL2-L2-VH2-L3-VH1-L4-CL-Fc and the second polypeptide has a structure represented by VL3-VH3; VH3-VL3; VL3-L4-VH3; VH3-L4-VL3; VL3-VH3-Fc; VH3-VL3-Fc; VL3-L4-VH3-Fc; VH3-L4-VL3-Fc; VL3-VH3-CH1; VH3-VL3-CH1; VL3-VH3-CL; VH3-VL3-CL; VL3-VH3-CH1-CL; VH3-VL3-CH1-CL; VL3-VH3-CL-CH1; VH3-VL3-CL-CH1; VL3-CL-VH3-CH1; VL3-CH1-VH3-CL; VH3-CH1-VL3-CL; VH3-CL-VL3-CH1; VL3-L6-VH3-L7-CH1; VH3-L6-VL3-L7-CH1; VL3-L6-VH3-L7-CL; VH3-L6-VL3-L7-CL; VL3-L6-VH3-L7-CH1-L8-CL; VH3-L6-VL3-L7-CH1-L8-CL; VL3-L6-VH3-L7-CL-L8-CH1; VH3-L6-VL3-L7-CL-L8-CH1; VL3-L6-CL-L7-VH3-L8-CH1; VL3-L6-CH1-L7-VH3-L8-CL; VH3-L6-CH1-L7-VL3-L8-CL; VH3-L6-CL-L7-VL3-L8-CH1; VL3-VH3-L6-CH1-CL; VH3-VL3-L6-CH1-CL; VL3-VH3-L6-CL-CH1; VH3-VL3-L6-CL-CH1; VL3-CL-L6-VH3-CH1; VL3-CH1-L6-VH3-CL; VH3-CH1-L6-VL3-CL; VH3-CL-L6-VL3-CH1; VL3-VH3-CH1-Fc; VH3-VL3-CH1-Fc; VL3-VH3-CL-Fc; VH3-VL3-CL-Fc; VL3-VH3-CH1-CL-Fc; VH3-VL3-CH1-CL-Fc; VL3-VH3-CL-CH1-Fc; VH3-VL3-CL-CH1-Fc; VL3-CL-VH3-CH1-Fc; VL3-CH1-VH3-CL-Fc; VH3-CH1-VL3-CL-Fc; VH3-CL-VL3-CH1-Fc; VL3-L6-VH3-L7-CH1-Fc; VH3-L6-VL3-L7-CH1-Fc; VL3-L6-VH3-L7-CL-Fc; VH3-L6-VL3-L7-CL-Fe; VL3-L6-VH3-L7-CH1-L8-CL-Fc; VH3-L6-VL3-L7-CH1-L8-CL-Fc; VL3-L6-VH3-L7-CL-L8-CH1-Fc; VH3-L6-VL3-L7-CL-L8-CH1-Fc; VL3-L6-CL-L7-VH3-L8-CH1-Fc; VL3-L6-CH1-L7-VH3-L8-CL-Fc; VH3-L6-CH1-L7-VL3-L8-CL-Fc; VH3-L6-CL-L7-VL3-L8-CH1-Fc; VL3-VH3-L6-CH1-CL-Fc; VH3-VL3-L6-CH1-CL-Fc; VL3-VH3-L6-CL-CH1-Fc; VH3-VL3-L6-CL-CH1-Fc; VL3-CL-L6-VH3-CH1-Fc; VL3-CH1-L6-VH3-CL-Fc; VH3-CH1-L6-VL3-CL-Fc; or VH3-CL-L6-VL3-CH1-Fc. In some aspects, the first polypeptide has a structure represented by VH1-L1-VH2-L2-VL2-L3-VL1-L4-CL-Fc and the second polypeptide has a structure represented by VL3-VH3; VH3-VL3; VL3-L4-VH3; VH3-L4-VL3; VL3-VH3-Fc; VH3-VL3-Fc; VL3-L4-VH3-Fc; VH3-L4-VL3-Fc; VL3-VH3-CH1; VH3-VL3-CH1; VL3-VH3-CL; VH3-VL3-CL; VL3-VH3-CH1-CL; VH3-VL3-CH1-CL; VL3-VH3-CL-CH1; VH3-VL3-CL-CH1; VL3-CL-VH3-CH1; VL3-CH1-VH3-CL; VH3-CH1-VL3-CL; VH3-CL-VL3-CH1; VL3-L6-VH3-L7-CH1; VH3-L6-VL3-L7-CH1; VL3-L6-VH3-L7-CL; VH3-L6-VL3-L7-CL; VL3-L6-VH3-L7-CH1-L8-CL; VH3-L6-VL3-L7-CH1-L8-CL; VL3-L6-VH3-L7-CL-L8-CH1; VH3-L6-VL3-L7-CL-L8-CH1; VL3-L6-CL-L7-VH3-L8-CH1; VL3-L6-CH1-L7-VH3-L8-CL; VH3-L6-CH1-L7-VL3-L8-CL; VH3-L6-CL-L7-VL3-L8-CH1; VL3-VH3-L6-CH1-CL; VH3-VL3-L6-CH1-CL; VL3-VH3-L6-CL-CH1; VH3-VL3-L6-CL-CH1; VL3-CL-L6-VH3-CH1; VL3-CH1-L6-VH3-CL; VH3-CH1-L6-VL3-CL; VH3-CL-L6-VL3-CH1; VL3-VH3-CH1-Fc; VH3-VL3-CH1-Fc; VL3-VH3-CL-Fc; VH3-VL3-CL-Fc; VL3-VH3-CH1-CL-Fc; VH3-VL3-CH1-CL-Fc; VL3-VH3-CL-CH1-Fc; VH3-VL3-CL-CH1-Fc; VL3-CL-VH3-CH1-Fe; VL3-CH1-VH3-CL-Fc; VH3-CH1-VL3-CL-Fc; VH3-CL-VL3-CH1-Fc; VL3-L6-VH3-L7-CH1-Fc; VH3-L6-VL3-L7-CH1-Fc; VL3-L6-VH3-L7-CL-Fc; VH3-L6-VL3-L7-CL-Fc; VL3-L6-VH3-L7-CH1-L8-CL-Fc; VH3-L6-VL3-L7-CH1-L8-CL-Fc; VL3-L6-VH3-L7-CL-L8-CH1-Fc; VH3-L6-VL3-L7-CL-L8-CH1-Fc; VL3-L6-CL-L7-VH3-L8-CH1-Fe; VL3-L6-CH1-L7-VH3-L8-CL-Fc; VH3-L6-CH1-L7-VL3-L8-CL-Fc; VH3-L6-CL-L7-VL3-L8-CH1-Fc; VL3-VH3-L6-CH1-CL-Fc; VH3-VL3-L6-CH1-CL-Fc; VL3-VH3-L6-CL-CH1-Fc; VH3-VL3-L6-CL-CH1-Fc; VL3-CL-L6-VH3-CH1-Fc; VL3-CH1-L6-VH3-CL-Fc; VH3-CH1-L6-VL3-CL-Fc; or VH3-CL-L6-VL3-CH1-Fc. In some aspects, the first polypeptide has a structure represented by VL1-L1-VL2-L2-VH2-L3-VH1-L4-CH1-L5-CL-Fc and the second polypeptide has a structure represented by VL3-VH3; VH3-VL3; VL3-L4-VH3; VH3-L4-VL3; VL3-VH3-Fc; VH3-VL3-Fc; VL3-L4-VH3-Fc; VH3-L4-VL3-Fc; VL3-VH3-CH1; VH3-VL3-CH1; VL3-VH3-CL; VH3-VL3-CL; VL3-VH3-CH1-CL; VH3-VL3-CH1-CL; VL3-VH3-CL-CH1; VH3-VL3-CL-CH1; VL3-CL-VH3-CH1; VL3-CH1-VH3-CL; VH3-CH1-VL3-CL; VH3-CL-VL3-CH1; VL3-L6-VH3-L7-CH1; VH3-L6-VL3-L7-CH1; VL3-L6-VH3-L7-CL; VH3-L6-VL3-L7-CL; VL3-L6-VH3-L7-CH1-L8-CL; VH3-L6-VL3-L7-CH1-L8-CL; VL3-L6-VH3-L7-CL-L8-CH1; VH3-L6-VL3-L7-CL-L8-CH1; VL3-L6-CL-L7-VH3-L8-CH1; VL3-L6-CH1-L7-VH3-L8-CL; VH3-L6-CH1-L7-VL3-L8-CL; VH3-L6-CL-L7-VL3-L8-CH1; VL3-VH3-L6-CH1-CL; VH3-VL3-L6-CH1-CL; VL3-VH3-L6-CL-CH1; VH3-VL3-L6-CL-CH1; VL3-CL-L6-VH3-CH1; VL3-CH1-L6-VH3-CL; VH3-CH1-L6-VL3-CL; VH3-CL-L6-VL3-CH1; VL3-VH3-CH1-Fc; VH3-VL3-CH1-Fc; VL3-VH3-CL-Fc; VH3-VL3-CL-Fc; VL3-VH3-CH1-CL-Fc; VH3-VL3-CH1-CL-Fc; VL3-VH3-CL-CH1-Fc; VH3-VL3-CL-CH1-Fc; VL3-CL-VH3-CH1-Fc; VL3-CH1-VH3-CL-Fc; VH3-CH1-VL3-CL-Fc; VH3-CL-VL3-CH1-Fc; VL3-L6-VH3-L7-CH1-Fc; VH3-L6-VL3-L7-CH1-Fc; VL3-L6-VH3-L7-CL-Fc; VH3-L6-VL3-L7-CL-Fc; VL3-L6-VH3-L7-CH1-L8-CL-Fc; VH3-L6-VL3-L7-CH1-L8-CL-Fc; VL3-L6-VH3-L7-CL-L8-CH1-Fc; VH3-L6-VL3-L7-CL-L8-CH1-Fc; VL3-L6-CL-L7-VH3-L8-CH1-Fc; VL3-L6-CH1-L7-VH3-L8-CL-Fc; VH3-L6-CH1-L7-VL3-L8-CL-Fc; VH3-L6-CL-L7-VL3-L8-CH1-Fc; VL3-VH3-L6-CH1-CL-Fc; VH3-VL3-L6-CH1-CL-Fc; VL3-VH3-L6-CL-CH1-Fc; VH3-VL3-L6-CL-CH1-Fc; VL3-CL-L6-VH3-CH1-Fc; VL3-CH1-L6-VH3-CL-Fc; VH3-CH1-L6-VL3-CL-Fc; or VH3-CL-L6-VL3-CH1-Fe. In some aspects, the first polypeptide has a structure represented by VH1-L1-VH2-L2-VL2-L3-VL1-L4-CH1-L5-CL-Fc and the second polypeptide has a structure represented by VL3-VH3; VH3-VL3; VL3-L4-VH3; VH3-L4-VL3; VL3-VH3-Fc; VH3-VL3-Fc; VL3-L4-VH3-Fc; VH3-L4-VL3-Fc; VL3-VH3-CH1; VH3-VL3-CH1; VL3-VH3-CL; VH3-VL3-CL; VL3-VH3-CH1-CL; VH3-VL3-CH1-CL; VL3-VH3-CL-CH1; VH3-VL3-CL-CH1; VL3-CL-VH3-CH1; VL3-CH1-VH3-CL; VH3-CH1-VL3-CL; VH3-CL-VL3-CH1; VL3-L6-VH3-L7-CH1; VH3-L6-VL3-L7-CH1; VL3-L6-VH3-L7-CL; VH3-L6-VL3-L7-CL; VL3-L6-VH3-L7-CH1-L8-CL; VH3-L6-VL3-L7-CH1-L8-CL; VL3-L6-VH3-L7-CL-L8-CH1; VH3-L6-VL3-L7-CL-L8-CH1; VL3-L6-CL-L7-VH3-L8-CH1; VL3-L6-CH1-L7-VH3-L8-CL; VH3-L6-CH1-L7-VL3-L8-CL; VH3-L6-CL-L7-VL3-L8-CH1; VL3-VH3-L6-CH1-CL; VH3-VL3-L6-CH1-CL; VL3-VH3-L6-CL-CH1; VH3-VL3-L6-CL-CH1; VL3-CL-L6-VH3-CH1; VL3-CH1-L6-VH3-CL; VH3-CH1-L6-VL3-CL; VH3-CL-L6-VL3-CH1; VL3-VH3-CH1-Fc; VH3-VL3-CH1-Fc; VL3-VH3-CL-Fc; VH3-VL3-CL-Fc; VL3-VH3-CH1-CL-Fc; VH3-VL3-CH1-CL-Fc; VL3-VH3-CL-CH1-Fc; VH3-VL3-CL-CH1-Fc; VL3-CL-VH3-CH1-Fc; VL3-CH1-VH3-CL-Fc; VH3-CH1-VL3-CL-Fc; VH3-CL-VL3-CH1-Fc; VL3-L6-VH3-L7-CH1-Fc; VH3-L6-VL3-L7-CH1-Fc; VL3-L6-VH3-L7-CL-Fc; VH3-L6-VL3-L7-CL-Fe; VL3-L6-VH3-L7-CH1-L8-CL-Fc; VH3-L6-VL3-L7-CH1-L8-CL-Fc; VL3-L6-VH3-L7-CL-L8-CH1-Fc; VH3-L6-VL3-L7-CL-L8-CH1-Fc; VL3-L6-CL-L7-VH3-L8-CH1-Fc; VL3-L6-CH1-L7-VH3-L8-CL-Fc; VH3-L6-CH1-L7-VL3-L8-CL-Fc; VH3-L6-CL-L7-VL3-L8-CH1-Fc; VL3-VH3-L6-CH1-CL-Fc; VH3-VL3-L6-CH1-CL-Fc; VL3-VH3-L6-CL-CH1-Fc; VH3-VL3-L6-CL-CH1-Fc; VL3-CL-L6-VH3-CH1-Fc; VL3-CH1-L6-VH3-CL-Fc; VH3-CH1-L6-VL3-CL-Fc; or VH3-CL-L6-VL3-CH1-Fe. In some aspects, the first polypeptide has a structure represented by VL1-L1-VL2-L2-VH2-L3-VH1-L4-CL-L5-CH1-Fc and the second polypeptide has a structure represented by VL3-VH3; VH3-VL3; VL3-L4-VH3; VH3-L4-VL3; VL3-VH3-Fc; VH3-VL3-Fc; VL3-L4-VH3-Fc; VH3-L4-VL3-Fc; VL3-VH3-CH1; VH3-VL3-CH1; VL3-VH3-CL; VH3-VL3-CL; VL3-VH3-CH1-CL; VH3-VL3-CH1-CL; VL3-VH3-CL-CH1; VH3-VL3-CL-CH1; VL3-CL-VH3-CH1; VL3-CH1-VH3-CL; VH3-CH1-VL3-CL; VH3-CL-VL3-CH1; VL3-L6-VH3-L7-CH1; VH3-L6-VL3-L7-CH1; VL3-L6-VH3-L7-CL; VH3-L6-VL3-L7-CL; VL3-L6-VH3-L7-CH1-L8-CL; VH3-L6-VL3-L7-CH1-L8-CL; VL3-L6-VH3-L7-CL-L8-CH1; VH3-L6-VL3-L7-CL-L8-CH1; VL3-L6-CL-L7-VH3-L8-CH1; VL3-L6-CH1-L7-VH3-L8-CL; VH3-L6-CH1-L7-VL3-L8-CL; VH3-L6-CL-L7-VL3-L8-CH1; VL3-VH3-L6-CH1-CL; VH3-VL3-L6-CH1-CL; VL3-VH3-L6-CL-CH1; VH3-VL3-L6-CL-CH1; VL3-CL-L6-VH3-CH1; VL3-CH1-L6-VH3-CL; VH3-CH1-L6-VL3-CL; VH3-CL-L6-VL3-CH1; VL3-VH3-CH1-Fc; VH3-VL3-CH1-Fc; VL3-VH3-CL-Fc; VH3-VL3-CL-Fc; VL3-VH3-CH1-CL-Fc; VH3-VL3-CH1-CL-Fc; VL3-VH3-CL-CH1-Fc; VH3-VL3-CL-CH1-Fc; VL3-CL-VH3-CH1-Fe; VL3-CH1-VH3-CL-Fc; VH3-CH1-VL3-CL-Fc; VH3-CL-VL3-CH1-Fc; VL3-L6-VH3-L7-CH1-Fc; VH3-L6-VL3-L7-CH1-Fc; VL3-L6-VH3-L7-CL-Fc; VH3-L6-VL3-L7-CL-Fc; VL3-L6-VH3-L7-CH1-L8-CL-Fc; VH3-L6-VL3-L7-CH1-L8-CL-Fc; VL3-L6-VH3-L7-CL-L8-CH1-Fc; VH3-L6-VL3-L7-CL-L8-CH1-Fc; VL3-L6-CL-L7-VH3-L8-CH1-Fe; VL3-L6-CH1-L7-VH3-L8-CL-Fc; VH3-L6-CH1-L7-VL3-L8-CL-Fc; VH3-L6-CL-L7-VL3-L8-CH1-Fc; VL3-VH3-L6-CH1-CL-Fc; VH3-VL3-L6-CH1-CL-Fc; VL3-VH3-L6-CL-CH1-Fc; VH3-VL3-L6-CL-CH1-Fc; VL3-CL-L6-VH3-CH1-Fc; VL3-CH1-L6-VH3-CL-Fc; VH3-CH1-L6-VL3-CL-Fc; or VH3-CL-L6-VL3-CH1-Fc. In some aspects, the first polypeptide has a structure represented by VH1-L1-VH2-L2-VL2-L3-VL1-L4-CL-L5-CH1-Fc and the second polypeptide has a structure represented by VL3-VH3; VH3-VL3; VL3-L4-VH3; VH3-L4-VL3; VL3-VH3-Fc; VH3-VL3-Fc; VL3-L4-VH3-Fc; VH3-L4-VL3-Fc; VL3-VH3-CH1; VH3-VL3-CH1; VL3-VH3-CL; VH3-VL3-CL; VL3-VH3-CH1-CL; VH3-VL3-CH1-CL; VL3-VH3-CL-CH1; VH3-VL3-CL-CH1; VL3-CL-VH3-CH1; VL3-CH1-VH3-CL; VH3-CH1-VL3-CL; VH3-CL-VL3-CH1; VL3-L6-VH3-L7-CH1; VH3-L6-VL3-L7-CH1; VL3-L6-VH3-L7-CL; VH3-L6-VL3-L7-CL; VL3-L6-VH3-L7-CH1-L8-CL; VH3-L6-VL3-L7-CH1-L8-CL; VL3-L6-VH3-L7-CL-L8-CH1; VH3-L6-VL3-L7-CL-L8-CH1; VL3-L6-CL-L7-VH3-L8-CH1; VL3-L6-CH1-L7-VH3-L8-CL; VH3-L6-CH1-L7-VL3-L8-CL; VH3-L6-CL-L7-VL3-L8-CH1; VL3-VH3-L6-CH1-CL; VH3-VL3-L6-CH1-CL; VL3-VH3-L6-CL-CH1; VH3-VL3-L6-CL-CH1; VL3-CL-L6-VH3-CH1; VL3-CH1-L6-VH3-CL; VH3-CH1-L6-VL3-CL; VH3-CL-L6-VL3-CH1; VL3-VH3-CH1-Fc; VH3-VL3-CH1-Fc; VL3-VH3-CL-Fc; VH3-VL3-CL-Fc; VL3-VH3-CH1-CL-Fc; VH3-VL3-CH1-CL-Fc; VL3-VH3-CL-CH1-Fc; VH3-VL3-CL-CH1-Fc; VL3-CL-VH3-CH1-Fc; VL3-CH1-VH3-CL-Fc; VH3-CH1-VL3-CL-Fc; VH3-CL-VL3-CH1-Fc; VL3-L6-VH3-L7-CH1-Fc; VH3-L6-VL3-L7-CH1-Fc; VL3-L6-VH3-L7-CL-Fc; VH3-L6-VL3-L7-CL-Fc; VL3-L6-VH3-L7-CH1-L8-CL-Fc; VH3-L6-VL3-L7-CH1-L8-CL-Fc; VL3-L6-VH3-L7-CL-L8-CH1-Fc; VH3-L6-VL3-L7-CL-L8-CH1-Fc; VL3-L6-CL-L7-VH3-L8-CH1-Fc; VL3-L6-CH1-L7-VH3-L8-CL-Fc; VH3-L6-CH1-L7-VL3-L8-CL-Fc; VH3-L6-CL-L7-VL3-L8-CH1-Fc; VL3-VH3-L6-CH1-CL-Fc; VH3-VL3-L6-CH1-CL-Fc; VL3-VH3-L6-CL-CH1-Fc; VH3-VL3-L6-CL-CH1-Fc; VL3-CL-L6-VH3-CH1-Fc; VL3-CH1-L6-VH3-CL-Fc; VH3-CH1-L6-VL3-CL-Fc; or VH3-CL-L6-VL3-CH1-Fc.

[0127] In other aspects, the invention is directed to an antigen binding polypeptide complex comprising a first polypeptide, a second polypeptide, and a third polypeptide; wherein the first polypeptide has a structure represented by VL1-VL2-VH2-VH1; VH1-VH2-VL2-VL1; VL1-L1-VL2-L2-VH2-L3-VH1; or VH1-L1-VH2-L2-VL2-L3-VL1; wherein the second polypeptide has a structure represented by VL3; wherein the third polypeptide has a structure represented by VH3; wherein VL1 is a first immunoglobulin light chain variable region; VL2 is a second immunoglobulin light chain variable region; VL3 is a third immunoglobulin light chain variable region; VH1 is a first immunoglobulin heavy chain variable region; VH2 is a second immunoglobulin heavy chain variable region; VH3 is a third immunoglobulin heavy chain variable region; and L1, L2 and L3 are amino acid linkers.

[0128] In other aspects, the invention is directed to an antigen binding polypeptide complex comprising a first polypeptide, a second polypeptide, and a third polypeptide; wherein the first polypeptide has a structure represented by VL1-VL2-VH2-VH1-Fc; VH1-VH2-VL2-VL1-Fc; VL1-L1-VL2-L2-VH2-L3-VH1-Fc; VH1-L1-VH2-L2-VL2-L3-VL1-Fc; VL1-L1-VL2-L2-VH2-L3-VH1-L4-Fc; or VH1-L1-VH2-L2-VL2-L3-VL1-L4-Fc; wherein the second polypeptide has a structure represented by VL3-Fc or VL3-L1-Fc; wherein the third polypeptide has a structure represented by VH3- or VH3-L1; wherein VL1 is a first immunoglobulin light chain variable region; VL2 is a second immunoglobulin light chain variable region; VL3 is a third immunoglobulin light chain variable region; VH1 is a first immunoglobulin heavy chain variable region; VH2 is a second immunoglobulin heavy chain variable region; VH3 is a third immunoglobulin heavy chain variable region; Fc is a region comprising an immunoglobulin heavy chain constant region 2 (CH2), an immunoglobulin heavy chain constant region 3 (CH3), and optionally, an immunoglobulin hinge; and L1, L2, L3 and L4 are amino acid linkers. In some aspects, the first polypeptide has a structure represented by VL1-VL2-VH2-VH1-Fc, the second polypeptide has a structure represented by VL3-Fc, and the third polypeptide has a structure represented by VH3. In some aspects, the first polypeptide has a structure represented by VL1-VL2-VH2-VH1-Fc, the second polypeptide has a structure represented by VL3-L1-Fc, and the third polypeptide has a structure represented by VH3. In some aspects, the first polypeptide has a structure represented by VL1-VL2-VH2-VH1-Fc, the second polypeptide has a structure represented by VL3-Fc, and the third polypeptide has a structure represented by VH3-L1. In some aspects, the first polypeptide has a structure represented by VL1-VL2-VH2-VH1-Fc, the second polypeptide has a structure represented by VL3-L1-Fc, and the third polypeptide has a structure represented by VH3-L1. In some aspects, the first polypeptide has a structure represented by VH1-VH2-VL2-VL1-Fc, the second polypeptide has a structure represented by VL3-Fc, and the third polypeptide has a structure represented by VH3. In some aspects, the first polypeptide has a structure represented by VH1-VH2-VL2-VL1-Fc, the second polypeptide has a structure represented by VL3-L1-Fc, and the third polypeptide has a structure represented by VH3. In some aspects, the first polypeptide has a structure represented by VH1-VH2-VL2-VL1-Fc, the second polypeptide has a structure represented by VL3-Fc, and the third polypeptide has a structure represented by VH3-L1. In some aspects, the first polypeptide has a structure represented by VH1-VH2-VL2-VL1-Fc, the second polypeptide has a structure represented by VL3-L1-Fc, and the third polypeptide has a structure represented by VH3-L1. In some aspects, the first polypeptide has a structure represented by VL1-L1-VL2-L2-VH2-L3-VH1-Fc, the second polypeptide has a structure represented by VL3-Fc, and the third polypeptide has a structure represented by VH3. In some aspects, the first polypeptide has a structure represented by VL1-L1-VL2-L2-VH2-L3-VH1-Fc, the second polypeptide has a structure represented by VL3-L1-Fc, and the third polypeptide has a structure represented by VH3. In some aspects, the first polypeptide has a structure represented by VL1-L1-VL2-L2-VH2-L3-VH1-Fc, the second polypeptide has a structure represented by VL3-Fc, and the third polypeptide has a structure represented by VH3-L1. In some aspects, the first polypeptide has a structure represented by VL1-L1-VL2-L2-VH2-L3-VH1-Fc, the second polypeptide has a structure represented by VL3-L1-Fc, and the third polypeptide has a structure represented by VH3-L1. In some aspects, the first polypeptide has a structure represented by VH1-L1-VH2-L2-VL2-L3-VL1-Fc, the second polypeptide has a structure represented by VL3-Fc, and the third polypeptide has a structure represented by VH3. In some aspects, the first polypeptide has a structure represented by VH1-L1-VH2-L2-VL2-L3-VL1-Fc, the second polypeptide has a structure represented by VL3-L1-Fc, and the third polypeptide has a structure represented by VH3. In some aspects, the first polypeptide has a structure represented by VH1-L1-VH2-L2-VL2-L3-VL1-Fc, the second polypeptide has a structure represented by VL3-Fc, and the third polypeptide has a structure represented by VH3-L1. In some aspects, the first polypeptide has a structure represented by VH1-L1-VH2-L2-VL2-L3-VL1-Fc, the second polypeptide has a structure represented by VL3-L1-Fc, and the third polypeptide has a structure represented by VH3-L1. In some aspects, the first polypeptide has a structure represented by VL1-L1-VL2-L2-VH2-L3-VH1-L4-Fc, the second polypeptide has a structure represented by VL3-Fc, and the third polypeptide has a structure represented by VH3. In some aspects, the first polypeptide has a structure represented by VL1-L1-VL2-L2-VH2-L3-VH1-L4-Fc, the second polypeptide has a structure represented by VL3-L1-Fc, and the third polypeptide has a structure represented by VH3. In some aspects, the first polypeptide has a structure represented by VL1-L1-VL2-L2-VH2-L3-VH1-L4-Fc, the second polypeptide has a structure represented by VL3-Fc, and the third polypeptide has a structure represented by VH3-L1. In some aspects, the first polypeptide has a structure represented by VL1-L1-VL2-L2-VH2-L3-VH1-L4-Fc, the second polypeptide has a structure represented by VL3-L1-Fc, and the third polypeptide has a structure represented by VH3-L1. In some aspects, the first polypeptide has a structure represented by VH1-L1-VH2-L2-VL2-L3-VL1-L4-Fc, the second polypeptide has a structure represented by VL3-Fc, and the third polypeptide has a structure represented by VH3. In some aspects, the first polypeptide has a structure represented by VH1-L1-VH2-L2-VL2-L3-VL1-L4-Fc, the second polypeptide has a structure represented by VL3-L1-Fc, and the third polypeptide has a structure represented by VH3. In some aspects, the first polypeptide has a structure represented by VH1-L1-VH2-L2-VL2-L3-VL1-L4-Fc, the second polypeptide has a structure represented by VL3-Fc, and the third polypeptide has a structure represented by VH3-L1. In some aspects, the first polypeptide has a structure represented by VH1-L1-VH2-L2-VL2-L3-VL1-L4-Fc, the second polypeptide has a structure represented by VL3-L1-Fc, and the third polypeptide has a structure represented by VH3-L1.

[0129] In other aspects, the invention is directed to an antigen binding polypeptide complex comprising a first polypeptide, a second polypeptide, and a third polypeptide; wherein the first polypeptide has a structure represented by VL1-VL2-VH2-VH1-Fc; VH1-VH2-VL2-VL1-Fc; VL1-L1-VL2-L2-VH2-L3-VH1-Fc; VH1-L1-VH2-L2-VL2-L3-VL1-Fc; VL1-L1-VL2-L2-VH2-L3-VH1-L4-Fc; or VH1-L1-VH2-L2-VL2-L3-VL1-L4-Fc; wherein the second polypeptide has a structure represented by VL3 or VL3-L1; wherein the third polypeptide has a structure represented by VH3-Fc or VH3-L1-Fc; wherein VL1 is a first immunoglobulin light chain variable region; VL2 is a second immunoglobulin light chain variable region; VL3 is a third immunoglobulin light chain variable region; VH1 is a first immunoglobulin heavy chain variable region; VH2 is a second immunoglobulin heavy chain variable region; VH3 is a third immunoglobulin heavy chain variable region; Fc is a region comprising an immunoglobulin heavy chain constant region 2 (CH2), an immunoglobulin heavy chain constant region 3 (CH3), and optionally, an immunoglobulin hinge; and L1, L2, L3 and L4 are amino acid linkers. In some aspects, the first polypeptide has a structure represented by VL1-VL2-VH2-VH1-Fc, the second polypeptide has a structure represented by VL3, and the third polypeptide has a structure represented by VH3-Fc. In some aspects, the first polypeptide has a structure represented by VL1-VL2-VH2-VH1-Fc, the second polypeptide has a structure represented by VL3-L1, and the third polypeptide has a structure represented by VH3-Fc. In some aspects, the first polypeptide has a structure represented by VL1-VL2-VH2-VH1-Fc, the second polypeptide has a structure represented by VL3, and the third polypeptide has a structure represented by VH3-L1-Fc. In some aspects, the first polypeptide has a structure represented by VL1-VL2-VH2-VH1-Fc, the second polypeptide has a structure represented by VL3-L1, and the third polypeptide has a structure represented by VH3-L1-Fc. In some aspects, the first polypeptide has a structure represented by VH1-VH2-VL2-VL1-Fc, the second polypeptide has a structure represented by VL3, and the third polypeptide has a structure represented by VH3-Fc. In some aspects, the first polypeptide has a structure represented by VH1-VH2-VL2-VL1-Fc, the second polypeptide has a structure represented by VL3-L1, and the third polypeptide has a structure represented by VH3-Fc. In some aspects, the first polypeptide has a structure represented by VH1-VH2-VL2-VL1-Fc, the second polypeptide has a structure represented by VL3, and the third polypeptide has a structure represented by VH3-L1-Fc. In some aspects, the first polypeptide has a structure represented by VH1-VH2-VL2-VL1-Fc, the second polypeptide has a structure represented by VL3-L1, and the third polypeptide has a structure represented by VH3-L1-Fc. In some aspects, the first polypeptide has a structure represented by VL1-L1-VL2-L2-VH2-L3-VH1-Fc, the second polypeptide has a structure represented by VL3, and the third polypeptide has a structure represented by VH3-Fc. In some aspects, the first polypeptide has a structure represented by VL1-L1-VL2-L2-VH2-L3-VH1-Fc, the second polypeptide has a structure represented by VL3-L1, and the third polypeptide has a structure represented by VH3-Fc. In some aspects, the first polypeptide has a structure represented by VL1-L1-VL2-L2-VH2-L3-VH1-Fc, the second polypeptide has a structure represented by VL3, and the third polypeptide has a structure represented by VH3-L1-Fc. In some aspects, the first polypeptide has a structure represented by VL1-L1-VL2-L2-VH2-L3-VH1-Fc, the second polypeptide has a structure represented by VL3-L1, and the third polypeptide has a structure represented by VH3-L1-Fc. In some aspects, the first polypeptide has a structure represented by VH1-L1-VH2-L2-VL2-L3-VL1-Fc, the second polypeptide has a structure represented by VL3, and the third polypeptide has a structure represented by VH3-Fc. In some aspects, the first polypeptide has a structure represented by VH1-L1-VH2-L2-VL2-L3-VL1-Fc, the second polypeptide has a structure represented by VL3-L1, and the third polypeptide has a structure represented by VH3-Fe. In some aspects, the first polypeptide has a structure represented by VH1-L1-VH2-L2-VL2-L3-VL1-Fc, the second polypeptide has a structure represented by VL3, and the third polypeptide has a structure represented by VH3-L1-Fc. In some aspects, the first polypeptide has a structure represented by VH1-L1-VH2-L2-VL2-L3-VL1-Fc, the second polypeptide has a structure represented by VL3-L1, and the third polypeptide has a structure represented by VH3-L1-Fc. In some aspects, the first polypeptide has a structure represented by VL1-L1-VL2-L2-VH2-L3-VH1-L4-Fc, the second polypeptide has a structure represented by VL3, and the third polypeptide has a structure represented by VH3-Fe. In some aspects, the first polypeptide has a structure represented by VL1-L1-VL2-L2-VH2-L3-VH1-L4-Fc, the second polypeptide has a structure represented by VL3-L1, and the third polypeptide has a structure represented by VH3-Fc. In some aspects, the first polypeptide has a structure represented by VL1-L1-VL2-L2-VH2-L3-VH1-L4-Fc, the second polypeptide has a structure represented by VL3, and the third polypeptide has a structure represented by VH3-L1-Fc. In some aspects, the first polypeptide has a structure represented by VL1-L1-VL2-L2-VH2-L3-VH1-L4-Fc, the second polypeptide has a structure represented by VL3-L1, and the third polypeptide has a structure represented by VH3-L1-Fc. In some aspects, the first polypeptide has a structure represented by VH1-L1-VH2-L2-VL2-L3-VL1-L4-Fc, the second polypeptide has a structure represented by VL3, and the third polypeptide has a structure represented by VH3-Fc. In some aspects, the first polypeptide has a structure represented by VH1-L1-VH2-L2-VL2-L3-VL1-L4-Fc, the second polypeptide has a structure represented by VL3-L1, and the third polypeptide has a structure represented by VH3-Fc. In some aspects, the first polypeptide has a structure represented by VH1-L1-VH2-L2-VL2-L3-VL1-L4-Fc, the second polypeptide has a structure represented by VL3, and the third polypeptide has a structure represented by VH3-L1-Fc. In some aspects, the first polypeptide has a structure represented by VH1-L1-VH2-L2-VL2-L3-VL1-L4-Fc, the second polypeptide has a structure represented by VL3-L1, and the third polypeptide has a structure represented by VH3-L1-Fc.

[0130] In other aspects, the invention is directed to an antigen binding polypeptide complex comprising a first polypeptide, a second polypeptide, and a third polypeptide; wherein the first polypeptide has a structure represented by VL1-VL2-VH2-VH1-CH1; VH1-VH2-VL2-VL1-CH1; VL1-VL2-VH2-VH1-CL; VH1-VH2-VL2-VL1-CL; VL1-VL2-VH2-VH1-CH1-CL; VH1-VH2-VL2-VL1-CH1-CL; VL1-VL2-VH2-VH1-CL-CH1; VH1-VH2-VL2-VL1-CL-CH1; VL1-L1-VL2-L2-VH2-L3-VH1-L4-CH1; VH1-L1-VH2-L2-VL2-L3-VL1-L4-CH1; VL1-L1-VL2-L2-VH2-L3-VH1-L4-CL; VH1-L1-VH2-L2-VL2-L3-VL1-L4-CL; VL1-L1-VL2-L2-VH2-L3-VH1-L4-CH1-L5-CL; VH1-L1-VH2-L2-VL2-L3-VL1-L4-CH1-L5-CL; VL1-L1-VL2-L2-VH2-L3-VH1-L4-CL-L5-CH1; or VH1-L1-VH2-L2-VL2-L3-VL1-L4-CL-L5-CH1; wherein the second polypeptide has a structure represented by VL3-CH1; VL3-CL; VL3-L1-CH1; or VL3-L1-CL; wherein the third polypeptide has a structure represented by VH3-CH1; VH3-CL; VH3-L1-CH1; or VH3-L1-CL; wherein VL1 is a first immunoglobulin light chain variable region; VL2 is a second immunoglobulin light chain variable region; VL3 is a third immunoglobulin light chain variable region; VH1 is a first immunoglobulin heavy chain variable region; VH12 is a second immunoglobulin heavy chain variable region; VH3 is a third immunoglobulin heavy chain variable region; CH1 is an immunoglobulin heavy chain constant region 1; CL is an immunoglobulin light chain constant region; and L1, L2, L3, L4 and L5 are amino acid linkers. In some aspects, the first polypeptide has a structure represented by VL1-VL2-VH2-VH1-CH1, the second polypeptide has a structure represented by VL3-CH1, and the third polypeptide has a structure represented by VH3-CH1; VH3-CL; VH3-L1-CH1; or VH3-L1-CL. In some aspects, the first polypeptide has a structure represented by VL1-VL2-VH2-VH1-CH1, the second polypeptide has a structure represented by VL3-CL, and the third polypeptide has a structure represented by VH3-CH1; VH3-CL; VH3-L1-CH1; or VH3-L1-CL. In some aspects, the first polypeptide has a structure represented by VL1-VL2-VH2-VH1-CH1, the second polypeptide has a structure represented by VL3-L1-CH1, and the third polypeptide has a structure represented by VH3-CH1; VH3-CL; VH3-L1-CH1; or VH3-L1-CL. In some aspects, the first polypeptide has a structure represented by VL1-VL2-VH2-VH1-CH1, the second polypeptide has a structure represented by VL3-L1-CL, and the third polypeptide has a structure represented by VH3-CH1; VH3-CL; VH3-L1-CH1; or VH3-L1-CL. In some aspects, the first polypeptide has a structure represented by VH1-VH2-VL2-VL1-CH1, the second polypeptide has a structure represented by VL3-CH1, and the third polypeptide has a structure represented by VH3-CH1; VH3-CL; VH3-L1-CH1; or VH3-L1-CL. In some aspects, the first polypeptide has a structure represented by VH1-VH2-VL2-VL1-CH1, the second polypeptide has a structure represented by VL3-CL, and the third polypeptide has a structure represented by VH3-CH1; VH3-CL; VH3-L1-CH1; or VH3-L1-CL. In some aspects, the first polypeptide has a structure represented by VH1-VH2-VL2-VL1-CH1, the second polypeptide has a structure represented by VL3-L1-CH1, and the third polypeptide has a structure represented by VH3-CH1; VH3-CL; VH3-L1-CH1; or VH3-L1-CL. In some aspects, the first polypeptide has a structure represented by VH1-VH2-VL2-VL1-CH1, the second polypeptide has a structure represented by VL3-L1-CL, and the third polypeptide has a structure represented by VH3-CH1; VH3-CL; VH3-L1-CH1; or VH3-L1-CL. In some aspects, the first polypeptide has a structure represented by VL1-VL2-VH2-VH1-CL, the second polypeptide has a structure represented by VL3-CH1, and the third polypeptide has a structure represented by VH3-CH1; VH3-CL; VH3-L1-CH1; or VH3-L1-CL. In some aspects, the first polypeptide has a structure represented by VL1-VL2-VH2-VH1-CL, the second polypeptide has a structure represented by VL3-CL, and the third polypeptide has a structure represented by VH3-CH1; VH3-CL; VH3-L1-CH1; or VH3-L1-CL. In some aspects, the first polypeptide has a structure represented by VL1-VL2-VH2-VH1-CL, the second polypeptide has a structure represented by VL3-L1-CH1, and the third polypeptide has a structure represented by VH3-CH1; VH3-CL; VH3-L1-CH1; or VH3-L1-CL. In some aspects, the first polypeptide has a structure represented by VL1-VL2-VH2-VH1-CL, the second polypeptide has a structure represented by VL3-L1-CL, and the third polypeptide has a structure represented by VH3-CH1; VH3-CL; VH3-L1-CH1; or VH3-L1-CL. In some aspects, the first polypeptide has a structure represented by VH1-VH2-VL2-VL1-CL, the second polypeptide has a structure represented by VL3-CH1, and the third polypeptide has a structure represented by VH3-CH1; VH3-CL; VH3-L1-CH1; or VH3-L1-CL. In some aspects, the first polypeptide has a structure represented by VH1-VH2-VL2-VL1-CL the second polypeptide has a structure represented by VL3-CL, and the third polypeptide has a structure represented by VH3-CH1; VH3-CL; VH3-L1-CH1; or VH3-L1-CL. In some aspects, the first polypeptide has a structure represented by VH1-VH2-VL2-VL1-CL, the second polypeptide has a structure represented by VL3-L1-CH1, and the third polypeptide has a structure represented by VH3-CH1; VH3-CL; VH3-L1-CH1; or VH3-L1-CL. In some aspects, the first polypeptide has a structure represented by VH1-VH2-VL2-VL1-CL, the second polypeptide has a structure represented by VL3-L1-CL, and the third polypeptide has a structure represented by VH3-CH1; VH3-CL; VH3-L1-CH1; or VH3-L1-CL. In some aspects, the first polypeptide has a structure represented by VL1-VL2-VH2-VH1-CH1-CL, the second polypeptide has a structure represented by VL3-CH1, and the third polypeptide has a structure represented by VH3-CH1; VH3-CL; VH3-L1-CH1; or VH3-L1-CL. In some aspects, the first polypeptide has a structure represented by VL1-VL2-VH2-VH1-CH1-CL, the second polypeptide has a structure represented by VL3-CL, and the third polypeptide has a structure represented by VH3-CH1; VH3-CL; VH3-L1-CH1; or VH3-L1-CL. In some aspects, the first polypeptide has a structure represented by VL1-VL2-VH2-VH1-CH1-CL, the second polypeptide has a structure represented by VL3-L1-CH1, and the third polypeptide has a structure represented by VH3-CH1; VH3-CL; VH3-L1-CH1; or VH3-L1-CL. In some aspects, the first polypeptide has a structure represented by VL1-VL2-VH2-VH1-CH1-CL, the second polypeptide has a structure represented by VL3-L1-CL, and the third polypeptide has a structure represented by VH3-CH1; VH3-CL; VH3-L1-CH1; or VH3-L1-CL. In some aspects, the first polypeptide has a structure represented by VH1-VH2-VL2-VL1-CH1-CL, the second polypeptide has a structure represented by VL3-CH1, and the third polypeptide has a structure represented by VH3-CH1; VH3-CL; VH3-L1-CH1; or VH3-L1-CL. In some aspects, the first polypeptide has a structure represented by VH1-VH2-VL2-VL1-CH1-CL, the second polypeptide has a structure represented by VL3-CL, and the third polypeptide has a structure represented by VH3-CH1; VH3-CL; VH3-L1-CH1; or VH3-L1-CL. In some aspects, the first polypeptide has a structure represented by VH1-VH2-VL2-VL1-CH1-CL, the second polypeptide has a structure represented by VL3-L1-CH1, and the third polypeptide has a structure represented by VH3-CH1; VH3-CL; VH3-L1-CH1; or VH3-L1-CL. In some aspects, the first polypeptide has a structure represented by VH1-VH2-VL2-VL1-CH1-CL, the second polypeptide has a structure represented by VL3-L1-CL, and the third polypeptide has a structure represented by VH3-CH1; VH3-CL; VH3-L1-CH1; or VH3-L1-CL. In some aspects, the first polypeptide has a structure represented by VL1-VL2-VH2-VH1-CL-CH1, the second polypeptide has a structure represented by VL3-CH1, and the third polypeptide has a structure represented by VH3-CH1; VH3-CL; VH3-L1-CH1; or VH3-L1-CL. In some aspects, the first polypeptide has a structure represented by VL1-VL2-VH2-VH1-CL-CH1, the second polypeptide has a structure represented by VL3-CL, and the third polypeptide has a structure represented by VH3-CH1; VH3-CL; VH3-L1-CH1; or VH3-L1-CL. In some aspects, the first polypeptide has a structure represented by VL1-VL2-VH2-VH1-CL-CH1, the second polypeptide has a structure represented by VL3-L1-CH1, and the third polypeptide has a structure represented by VH3-CH1; VH3-CL; VH3-L1-CH1; or VH3-L1-CL. In some aspects, the first polypeptide has a structure represented by VL1-VL2-VH2-VH1-CL-CH1, the second polypeptide has a structure represented by VL3-L1-CL, and the third polypeptide has a structure represented by VH3-CH1; VH3-CL; VH3-L1-CH1; or VH3-L1-CL. In some aspects, the first polypeptide has a structure represented by VH1-VH2-VL2-VL1-CL-CH1, the second polypeptide has a structure represented by VL3-CH1, and the third polypeptide has a structure represented by VH3-CH1; VH3-CL; VH3-L1-CH1; or VH3-L1-CL. In some aspects, the first polypeptide has a structure represented by VH1-VH2-VL2-VL1-CL-CH1, the second polypeptide has a structure represented by VL3-CL, and the third polypeptide has a structure represented by VH3-CH1; VH3-CL; VH3-L1-CH1; or VH3-L1-CL. In some aspects, the first polypeptide has a structure represented by VH1-VH2-VL2-VL1-CL-CH1, the second polypeptide has a structure represented by VL3-L1-CH1, and the third polypeptide has a structure represented by VH3-CH1; VH3-CL; VH3-L1-CH1; or VH3-L1-CL. In some aspects, the first polypeptide has a structure represented by VH1-VH2-VL2-VL1-CL-CH1, the second polypeptide has a structure represented by VL3-L1-CL, and the third polypeptide has a structure represented by VH3-CH1; VH3-CL; VH3-L1-CH1; or VH3-L1-CL. In some aspects, the first polypeptide has a structure represented by VL1-L1-VL2-L2-VH2-L3-VH1-L4-CH1, the second polypeptide has a structure represented by VL3-CH1, and the third polypeptide has a structure represented by VH3-CH1; VH3-CL; VH3-L1-CH1; or VH3-L1-CL. In some aspects, the first polypeptide has a structure represented by VL1-L1-VL2-L2-VH2-L3-VH1-L4-CH1, the second polypeptide has a structure represented by VL3-CL, and the third polypeptide has a structure represented by VH3-CH1; VH3-CL; VH3-L1-CH1; or VH3-L1-CL. In some aspects, the first polypeptide has a structure represented by VL1-L1-VL2-L2-VH2-L3-VH1-L4-CH1, the second polypeptide has a structure represented by VL3-L1-CH1, and the third polypeptide has a structure represented by VH3-CH1; VH3-CL; VH3-L1-CH1; or VH3-L1-CL. In some aspects, the first polypeptide has a structure represented by VL1-L1-VL2-L2-VH2-L3-VH1-L4-CH1, the second polypeptide has a structure represented by VL3-L1-CL, and the third polypeptide has a structure represented by VH3-CH1; VH3-CL; VH3-L1-CH1; or VH3-L1-CL. In some aspects, the first polypeptide has a structure represented by VH1-L1-VH2-L2-VL2-L3-VL1-L4-CH1, the second polypeptide has a structure represented by VL3-CH1, and the third polypeptide has a structure represented by VH3-CH1; VH3-CL; VH3-L1-CH1; or VH3-L1-CL. In some aspects, the first polypeptide has a structure represented by VH1-L1-VH2-L2-VL2-L3-VL1-L4-CH1, the second polypeptide has a structure represented by VL3-CL, and the third polypeptide has a structure represented by VH3-CH1; VH3-CL; VH3-L1-CH1; or VH3-L1-CL. In some aspects, the first polypeptide has a structure represented by VH1-L1-VH2-L2-VL2-L3-VL1-L4-CH1, the second polypeptide has a structure represented by VL3-L1-CH1, and the third polypeptide has a structure represented by VH3-CH1; VH3-CL; VH3-L1-CH1; or VH3-L1-CL. In some aspects, the first polypeptide has a structure represented by VH1-L1-VH2-L2-VL2-L3-VL1-L4-CH1, the second polypeptide has a structure represented by VL3-L1-CL, and the third polypeptide has a structure represented by VH3-CH1; VH3-CL; VH3-L1-CH1; or VH3-L1-CL. In some aspects, the first polypeptide has a structure represented by VL1-L1-VL2-L2-VH2-L3-VH1-L4-CL, the second polypeptide has a structure represented by VL3-CH1, and the third polypeptide has a structure represented by VH3-CH1; VH3-CL; VH3-L1-CH1; or VH3-L1-CL. In some aspects, the first polypeptide has a structure represented by VL1-L1-VL2-L2-VH2-L3-VH1-L4-CL, the second polypeptide has a structure represented by VL3-CL, and the third polypeptide has a structure represented by VH3-CH1; VH3-CL; VH3-L1-CH1; or VH3-L1-CL. In some aspects, the first polypeptide has a structure represented by VL1-L1-VL2-L2-VH2-L3-VH1-L4-CL, the second polypeptide has a structure represented by VL3-L1-CH1, and the third polypeptide has a structure represented by VH3-CH1; VH3-CL; VH3-L1-CH1; or VH3-L1-CL. In some aspects, the first polypeptide has a structure represented by VL1-L1-VL2-L2-VH2-L3-VH1-L4-CL, the second polypeptide has a structure represented by VL3-L1-CL, and the third polypeptide has a structure represented by VH3-CH1; VH3-CL; VH3-L1-CH1; or VH3-L1-CL. In some aspects, the first polypeptide has a structure represented by VH1-L1-VH2-L2-VL2-L3-VL1-L4-CL, the second polypeptide has a structure represented by VL3-CH1, and the third polypeptide has a structure represented by VH3-CH1; VH3-CL; VH3-L1-CH1; or VH3-L1-CL. In some aspects, the first polypeptide has a structure represented by VH1-L1-VH2-L2-VL2-L3-VL1-L4-CL, the second polypeptide has a structure represented by VL3-CL, and the third polypeptide has a structure represented by VH3-CH1; VH3-CL; VH3-L1-CH1; or VH3-L1-CL. In some aspects, the first polypeptide has a structure represented by VH1-L1-VH2-L2-VL2-L3-VL1-L4-CL, the second polypeptide has a structure represented by VL3-L1-CH1, and the third polypeptide has a structure represented by VH3-CH1; VH3-CL; VH3-L1-CH1; or VH3-L1-CL. In some aspects, the first polypeptide has a structure represented by VH1-L1-VH2-L2-VL2-L3-VL1-L4-CL, the second polypeptide has a structure represented by VL3-L1-CL, and the third polypeptide has a structure represented by VH3-CH1; VH3-CL; VH3-L1-CH1; or VH3-L1-CL. In some aspects, the first polypeptide has a structure represented by VL1-L1-VL2-L2-VH2-L3-VH1-L4-CH1-L5-CL, the second polypeptide has a structure represented by VL3-CH1, and the third polypeptide has a structure represented by VH3-CH1; VH3-CL; VH3-L1-CH1; or VH3-L1-CL. In some aspects, the first polypeptide has a structure represented by VL1-L1-VL2-L2-VH2-L3-VH1-L4-CH1-L5-CL, the second polypeptide has a structure represented by VL3-CL, and the third polypeptide has a structure represented by VH3-CH1; VH3-CL; VH3-L1-CH1; or VH3-L1-CL. In some aspects, the first polypeptide has a structure represented by VL1-L1-VL2-L2-VH2-L3-VH1-L4-CH1-L5-CL, the second polypeptide has a structure represented by VL3-L1-CH1, and the third polypeptide has a structure represented by VH3-CH1; VH3-CL; VH3-L1-CH1; or VH3-L1-CL. In some aspects, the first polypeptide has a structure represented by VL1-L1-VL2-L2-VH2-L3-VH1-L4-CH1-L5-CL, the second polypeptide has a structure represented by VL3-L1-CL, and the third polypeptide has a structure represented by VH3-CH1; VH3-CL; VH3-L1-CH1; or VH3-L1-CL. In some aspects, the first polypeptide has a structure represented by VH1-L1-VH2-L2-VL2-L3-VL1-L4-CH1-L5-CL, the second polypeptide has a structure represented by VL3-CH1, and the third polypeptide has a structure represented by VH3-CH1; VH3-CL; VH3-L1-CH1; or VH3-L1-CL. In some aspects, the first polypeptide has a structure represented by VH1-L1-VH2-L2-VL2-L3-VL1-L4-CH1-L5-CL, the second polypeptide has a structure represented by VL3-CL, and the third polypeptide has a structure represented by VH3-CH1; VH3-CL; VH3-L1-CH1; or VH3-L1-CL. In some aspects, the first polypeptide has a structure represented by VH1-L1-VH2-L2-VL2-L3-VL1-L4-CH1-L5-CL, the second polypeptide has a structure represented by VL3-L1-CH1, and the third polypeptide has a structure represented by VH3-CH1; VH3-CL; VH3-L1-CH1; or VH3-L1-CL. In some aspects, the first polypeptide has a structure represented by VH1-L1-VH2-L2-VL2-L3-VL1-L4-CH1-L5-CL, the second polypeptide has a structure represented by VL3-L1-CL, and the third polypeptide has a structure represented by VH3-CH1; VH3-CL; VH3-L1-CH1; or VH3-L1-CL. In some aspects, the first polypeptide has a structure represented by VL1-L1-VL2-L2-VH2-L3-VH1-L4-CL-L5-CH1, the second polypeptide has a structure represented by VL3-CH1, and the third polypeptide has a structure represented by VH3-CH1; VH3-CL; VH3-L1-CH1; or VH3-L1-CL. In some aspects, the first polypeptide has a structure represented by VL1-L1-VL2-L2-VH2-L3-VH1-L4-CL-L5-CH1, the second polypeptide has a structure represented by VL3-CL, and the third polypeptide has a structure represented by VH3-CH1; VH3-CL; VH3-L1-CH1; or VH3-L1-CL. In some aspects, the first polypeptide has a structure represented by VL1-L1-VL2-L2-VH2-L3-VH1-L4-CL-L5-CH1, the second polypeptide has a structure represented by VL3-L1-CH1, and the third polypeptide has a structure represented by VH3-CH1; VH3-CL; VH3-L1-CH1; or VH3-L1-CL. In some aspects, the first polypeptide has a structure represented by VL1-L1-VL2-L2-VH2-L3-VH1-L4-CL-L5-CH1, the second polypeptide has a structure represented by VL3-L1-CL, and the third polypeptide has a structure represented by VH3-CH1; VH3-CL; VH3-L1-CH1; or VH3-L1-CL. In some aspects, the first polypeptide has a structure represented by VH1-L1-VH2-L2-VL2-L3-VL1-L4-CL-L5-CH1, the second polypeptide has a structure represented by VL3-CH1, and the third polypeptide has a structure represented by VH3-CH1; VH3-CL; VH3-L1-CH1; or VH3-L1-CL. In some aspects, the first polypeptide has a structure represented by VH1-L1-VH2-L2-VL2-L3-VL1-L4-CL-L5-CH1, the second polypeptide has a structure represented by VL3-CL, and the third polypeptide has a structure represented by VH3-CH1; VH3-CL; VH3-L1-CH1; or VH3-L1-CL. In some aspects, the first polypeptide has a structure represented by VH1-L1-VH2-L2-VL2-L3-VL1-L4-CL-L5-CH1, the second polypeptide has a structure represented by VL3-L1-CH1, and the third polypeptide has a structure represented by VH3-CH1; VH3-CL; VH3-L1-CH1; or VH3-L1-CL. In some aspects, the first polypeptide has a structure represented by VH1-L1-VH2-L2-VL2-L3-VL1-L4-CL-L5-CH1, the second polypeptide has a structure represented by VL3-L1-CL, and the third polypeptide has a structure represented by VH3-CH1; VH3-CL; VH3-L1-CH1; or VH3-L1-CL.

[0131] In other aspects, the invention is directed to an antigen binding polypeptide complex comprising a first polypeptide, a second polypeptide, and a third polypeptide; wherein the first polypeptide has a structure represented by VL1-VL2-VH2-VH1; VH1-VH2-VL2-VL1; VL1-L1-VL2-L2-VH2-L3-VH1; VH1-L1-VH2-L2-VL2-L3-VL1; VL1-VL2-VH2-VH1-Fc; VH1-VH2-VL2-VL1-Fc; VL1-L1-VL2-L2-VH2-L3-VH1-Fc; VH1-L1-VH2-L2-VL2-L3-VL1-Fc; VL1-L1-VL2-L2-VH2-L3-VH1-L4-Fc; VH1-L1-VH2-L2-VL2-L3-VL1-L4-Fc; VL1-VL2-VH2-VH1-CH1; VH1-VH2-VL2-VL1-CH1; VL1-VL2-VH2-VH1-CL; VH1-VH2-VL2-VL1-CL; VL1-VL2-VH2-VH1-CH1-CL; VH1-VH2-VL2-VL1-CH1-CL; VL1-VL2-VH2-VH1-CL-CH1; VH1-VH2-VL2-VL1-CL-CH1; VL1-L1-VL2-L2-VH2-L3-VH1-L4-CH1; VH1-L1-VH2-L2-VL2-L3-VL1-L4-CH1; VL1-L1-VL2-L2-VH2-L3-VH1-L4-CL; VH1-L1-VH2-L2-VL2-L3-VL1-L4-CL; VL1-L1-VL2-L2-VH2-L3-VH1-L4-CH1-L5-CL; VH1-L1-VH2-L2-VL2-L3-VL1-L4-CH1-L5-CL; VL1-L1-VL2-L2-VH2-L3-VH1-L4-CL-L5-CH1; VH1-L1-VH2-L2-VL2-L3-VL1-L4-CL-L5-CH1; VL1-VL2-VH2-VH1-CH1-Fc; VH1-VH2-VL2-VL1-CH1-Fc; VL1-VL2-VH2-VH1-CL-Fc; VH1-VH2-VL2-VL1-CL-Fc; VL1-VL2-VH2-VH1-CH1-CL-Fc; VH1-VH2-VL2-VL1-CH1-CL-Fc; VL1-VL2-VH2-VH1-CL-CH1-Fc; VH1-VH2-VL2-VL1-CL-CH1-Fc; VL1-L1-VL2-L2-VH2-L3-VH1-L4-CH1-Fc; VH1-L1-VH2-L2-VL2-L3-VL1-L4-CH1-Fc; VL1-L1-VL2-L2-VH2-L3-VH1-L4-CL-Fc; VH1-L1-VH2-L2-VL2-L3-VL1-L4-CL-Fc; VL1-L1-VL2-L2-VH2-L3-VH1-L4-CH1-L5-CL-Fc; VH1-L1-VH2-L2-VL2-L3-VL1-L4-CH1-L5-CL-Fc; VL1-L1-VL2-L2-VH2-L3-VH1-L4-CL-L5-CH1-Fc; or VH1-L1-VH2-L2-VL2-L3-VL1-L4-CL-L5-CH1-Fc; wherein the second polypeptide has a structure represented by VL3; VL3-Fc; VL3-CH1; VL3-CL; VL3-CH1-CL; VL3-CL-CH1; VL3-CH1-Fc; VL3-CL-Fc; VL3-CH1-CL-Fc; VL3-CL-CH1-Fc; VL3-L1-Fc; VL3-L1-CH1; VL3-L1-CL; VL3-L1-CH1-L2-CL; VL3-L1-CL-L2-CH1; VL3-L1-CH1-L2-Fc; VL3-L1-CL-L2-Fc; VL3-L1-CH1-L2-CL-Fc; or VL3-L1-CL-L2-CH1-Fc; wherein the third polypeptide has a structure represented by VH3; VH13-Fc; VH3-CH1; VH3-CL; VH3-CH1-CL; VH3-CL-CH1; VH3-CH1-Fc; VH3-CL-Fc; VH3-CH1-CL-Fc; VH3-CL-CH1-Fc; VH3-L1-Fc; VH3-L1-CH1; VH3-L1-CL; VH3-L1-CH1-L2-CL; VH3-L1-CL-L2-CH1; VH3-L1-CH1-L2-Fc; VH3-L1-CL-L2-Fc; VH3-L1-CH1-L2-CL-Fc; or VH3-L1-CL-L2-CH1-Fc; wherein VL1 is a first immunoglobulin light chain variable region; VL2 is a second immunoglobulin light chain variable region; VL3 is a third immunoglobulin light chain variable region; VH1 is a first immunoglobulin heavy chain variable region; VH12 is a second immunoglobulin heavy chain variable region; VH3 is a third immunoglobulin heavy chain variable region; Fc is a region comprising an immunoglobulin heavy chain constant region 2 (CH2), an immunoglobulin heavy chain constant region 3 (CH3), and optionally, an immunoglobulin hinge; CH1 is an immunoglobulin heavy chain constant region 1; CL is an immunoglobulin light chain constant region; and L1, L2, L3, L4 and L5 are amino acid linkers. In some aspects, the first polypeptide has a structure represented by VL1-VL2-VH2-VH1, the second polypeptide has a structure represented by VL3, and the third polypeptide has a structure represented by VH3; optionally wherein the first, second and/or third polypeptide comprises at least one of an Fc region, a CL region, and a CH1 region at the carboxy terminus of the first, second and/or third polypeptide, or wherein the first, second and/or third polypeptide comprises a CH1-CL, CL-CH1, CH1-Fc, CL-Fc, CL-CH1-Fc, CH1-CL-Fc at the carboxy terminus of the first, second and/or third polypeptide. In some aspects, the first polypeptide has a structure represented by VL1-VL2-VH2-VH1, the second polypeptide has a structure represented by VL3, and the third polypeptide has a structure represented by VH3; optionally wherein the first, second and/or third polypeptide comprises at least one of an Fc region, a CL region, and a CH1 region at the carboxy terminus of the first, second and/or third polypeptide, or wherein the first, second and/or third polypeptide comprises a CH1-CL, CL-CH1, CH1-Fc, CL-Fc, CL-CH1-Fc, CH1-CL-Fc at the carboxy terminus of the first, second and/or third polypeptide, wherein the CH1-CL, CL-CH1, CH1-Fc, CL-Fc, CL-CH1-Fc, or CH1-CL-Fc region is linked to the carboxy terminus of the second polypeptide via one or more amino acid linker, and wherein the CH1, CL and Fc when present in the second polypeptide are linked to each other via one or more amino acid linker. In some aspects, the first polypeptide has a structure represented by VL1-VL2-VH2-VH1, the second polypeptide has a structure represented by VL3, and the third polypeptide has a structure represented by VH3; optionally wherein the first, second and/or third polypeptide comprises at least one of an Fc region, a CL region, and a CH1 region at the carboxy terminus of the first, second and/or third polypeptide, or wherein the first, second and/or third polypeptide comprises a CH1-CL, CL-CH1, CH1-Fc, CL-Fc, CL-CH1-Fc, CH1-CL-Fc at the carboxy terminus of the first, second and/or third polypeptide, wherein the CH1-CL, CL-CH1, CH1-Fc, CL-Fc, CL-CH1-Fc, or CH1-CL-Fc region is linked to the carboxy terminus of the third polypeptide via one or more amino acid linker, and wherein the CH1, CL and Fc when present in the third polypeptide are linked to each other via one or more amino acid linker. In some aspects, the first polypeptide has a structure represented by VL1-VL2-VH2-VH1, the second polypeptide has a structure represented by VL3, and the third polypeptide has a structure represented by VH3; optionally wherein the first, second and/or third polypeptide comprises at least one of an Fc region, a CL region, and a CH1 region at the carboxy terminus of the first, second and/or third polypeptide, or wherein the first, second and/or third polypeptide comprises a CH1-CL, CL-CH1, CH1-Fc, CL-Fc, CL-CH1-Fc, CH1-CL-Fc at the carboxy terminus of the first, second and/or third polypeptide, wherein the CH1-CL, CL-CH1, CH1-Fc, CL-Fc, CL-CH1-Fc, or CH1-CL-Fc region is linked to the carboxy terminus of the second and third polypeptide via one or more amino acid linker, and wherein the CH1, CL and Fc when present in the second and third polypeptide are linked to each other via one or more amino acid linker. In some aspects, the first polypeptide has a structure represented by VL1-L1-VL2-L2-VH2-L3-VH1, the second polypeptide has a structure represented by VL3, and the third polypeptide has a structure represented by VH3; optionally wherein the first, second and/or third polypeptide comprises at least one of an Fc region, a CL region, and a CH1 region at the carboxy terminus of the first, second and/or third polypeptide, or wherein the first, second and/or third polypeptide comprises a CH1-CL, CL-CH1, CH1-Fc, CL-Fc, CL-CH1-Fc, CH1-CL-Fc at the carboxy terminus of the first, second and/or third polypeptide. In some aspects, the first polypeptide has a structure represented by VL1-L1-VL2-L2-VH2-L3-VH1, the second polypeptide has a structure represented by VL3 and the third polypeptide has a structure represented by VH3; optionally wherein the first, second and/or third polypeptide comprises at least one of an Fc region, a CL region, and a CH1 region at the carboxy terminus of the first, second and/or third polypeptide, wherein the at least one Fc region, CL region and CH1 region is linked to the carboxy terminus of the first, second and/or third polypeptide via one or more amino acid linker, or wherein the first, second and/or third polypeptide comprises a CH1-CL, CL-CH1, CH1-Fc, CL-Fc, CL-CH1-Fc, or CH1-CL-Fc, wherein the CH1-CL, CL-CH1, CH1-Fc, CL-Fc, CL-CH1-Fc, or CH1-CL-Fc region is linked to the carboxy terminus of the second polypeptide via one or more amino acid linker, and wherein the CH1, CL and Fe when present in the second polypeptide are linked to each other via one or more amino acid linker. In some aspects, the first polypeptide has a structure represented by VL1-L1-VL2-L2-VH2-L3-VH1, the second polypeptide has a structure represented by VL3 and the third polypeptide has a structure represented by VH3; optionally wherein the first, second and/or third polypeptide comprises at least one of an Fc region, a CL region, and a CH1 region at the carboxy terminus of the first, second and/or third polypeptide, wherein the at least one Fc region, CL region and CH1 region is linked to the carboxy terminus of the first, second and/or third polypeptide via one or more amino acid linker, or wherein the first, second and/or third polypeptide comprises a CH1-CL, CL-CH1, CH1-Fc, CL-Fc, CL-CH1-Fc, or CH1-CL-Fc, wherein the CH1-CL, CL-CH1, CH1-Fc, CL-Fc, CL-CH1-Fc, or CH1-CL-Fc region is linked to the carboxy terminus of the third polypeptide via one or more amino acid linker, and wherein the CH1, CL and Fe when present in the third polypeptide are linked to each other via one or more amino acid linker. In some aspects, the first polypeptide has a structure represented by VL1-L1-VL2-L2-VH2-L3-VH1, the second polypeptide has a structure represented by VL3 and the third polypeptide has a structure represented by VH3; optionally wherein the first, second and/or third polypeptide comprises at least one of an Fc region, a CL region, and a CH1 region at the carboxy terminus of the first, second and/or third polypeptide, wherein the at least one Fc region, CL region and CH1 region is linked to the carboxy terminus of the first, second and/or third polypeptide via one or more amino acid linker, or wherein the first, second and/or third polypeptide comprises a CH1-CL, CL-CH1, CH1-Fc, CL-Fc, CL-CH1-Fc, or CH1-CL-Fc, wherein the CH1-CL, CL-CH1, CH1-Fc, CL-Fc, CL-CH1-Fc, or CH1-CL-Fc region is linked to the carboxy terminus of the second and third polypeptide via one or more amino acid linker, and wherein the CH1, CL and Fc when present in the second and third polypeptide are linked to each other via one or more amino acid linker. In some aspects, the first polypeptide has a structure represented by VH1-VH2-VL2-VL1, the second polypeptide has a structure represented by VL3, and the third polypeptide has a structure represented by VH3; optionally wherein the first, second and/or third polypeptide comprises at least one of an Fc region, a CL region, and a CH1 region at the carboxy terminus of the first, second and/or third polypeptide, or wherein the first, second and/or third polypeptide comprises a CH1-CL, CL-CH1, CH1-Fc, CL-Fc, CL-CH1-Fc, CH1-CL-Fc at the carboxy terminus of the first, second and/or third polypeptide. In some aspects, the first polypeptide has a structure represented by VH1-VH2-VL2-VL1, the second polypeptide has a structure represented by VL3, and the third polypeptide has a structure represented by VH3; optionally wherein the first, second and/or third polypeptide comprises at least one of an Fc region, a CL region, and a CH1 region at the carboxy terminus of the first, second and/or third polypeptide, wherein the at least one Fc region, CL region and CH1 region is linked to the carboxy terminus of the first, second and/or third polypeptide via one or more amino acid linker, or wherein the first, second and/or third polypeptide comprises a CH1-CL, CL-CH1, CH1-Fc, CL-Fc, CL-CH1-Fc, or CH1-CL-Fc, wherein the CH1-CL, CL-CH1, CH1-Fc, CL-Fc, CL-CH1-Fc, or CH1-CL-Fc region is linked to the carboxy terminus of the second polypeptide via one or more amino acid linker, and wherein the CH1, CL and Fc when present in the second polypeptide are linked to each other via one or more amino acid linker. In some aspects, the first polypeptide has a structure represented by VH1-VH2-VL2-VL1, the second polypeptide has a structure represented by VL3, and the third polypeptide has a structure represented by VH3; optionally wherein the first, second and/or third polypeptide comprises at least one of an Fc region, a CL region, and a CH1 region at the carboxy terminus of the first, second and/or third polypeptide, wherein the at least one Fc region, CL region and CH1 region is linked to the carboxy terminus of the first, second and/or third polypeptide via one or more amino acid linker, or wherein the first, second and/or third polypeptide comprises a CH1-CL, CL-CH1, CH1-Fc, CL-Fc, CL-CH1-Fc, or CH1-CL-Fc, wherein the CH1-CL, CL-CH1, CH1-Fc, CL-Fc, CL-CH1-Fc, or CH1-CL-Fc region is linked to the carboxy terminus of the third polypeptide via one or more amino acid linker, and wherein the CH1, CL and Fc when present in the third polypeptide are linked to each other via one or more amino acid linker. In some aspects, the first polypeptide has a structure represented by VH1i-VH2-VL2-VL1, the second polypeptide has a structure represented by VL3, and the third polypeptide has a structure represented by VH3; optionally wherein the first, second and/or third polypeptide comprises at least one of an Fc region, a CL region, and a CH1 region at the carboxy terminus of the first, second and/or third polypeptide, wherein the at least one Fc region, CL region and CH1 region is linked to the carboxy terminus of the first, second and/or third polypeptide via one or more amino acid linker, or wherein the first, second and/or third polypeptide comprises a CH1-CL, CL-CH1, CH1-Fc, CL-Fc, CL-CH1-Fc, or CH1-CL-Fc, wherein the CH1-CL, CL-CH1, CH1-Fc, CL-Fc, CL-CH1I-Fc, or CH1-CL-Fc region is linked to the carboxy terminus of the second and third polypeptide via one or more amino acid linker, and wherein the CH1, CL and Fc when present in the second and third polypeptide are linked to each other via one or more amino acid linker. In some aspects, the first polypeptide has a structure represented by VH1-L1-VH2-L2-VL2-L3-VL1, the second polypeptide has a structure represented by VL3, and the third polypeptide has a structure represented by VH3; optionally wherein the first, second and/or third polypeptide comprises at least one of an Fc region, a CL region, and a CH1 region at the carboxy terminus of the first, second and/or third polypeptide, or wherein the first, second and/or third polypeptide comprises a CH1-CL, CL-CH1, CH1-Fc, CL-Fc, CL-CH1-Fc, CH1-CL-Fc at the carboxy terminus of the first, second and/or third polypeptide. In some aspects, the first polypeptide has a structure represented by VH1-L1-VH2-L2-VL2-L3-VL1, the second polypeptide has a structure represented by VL3 and the third polypeptide has a structure represented by VH3; optionally wherein the first, second and/or third polypeptide comprises at least one of an Fc region, a CL region, and a CH1 region at the carboxy terminus of the first, second and/or third polypeptide, wherein the at least one Fc region, CL region and CH1 region is linked to the carboxy terminus of the first, second and/or third polypeptide via one or more amino acid linker, or wherein the first, second and/or third polypeptide comprises a CH1-CL, CL-CH1, CH1-Fc, CL-Fc, CL-CH1-Fc, or CH1-CL-Fc, wherein the CH1-CL, CL-CH1, CH1-Fc, CL-Fc, CL-CH1-Fc, or CH1-CL-Fc region is linked to the carboxy terminus of the second polypeptide via one or more amino acid linker, and wherein the CH1, CL and Fc when present in the second polypeptide are linked to each other via one or more amino acid linker. In some aspects, the first polypeptide has a structure represented by VH1-L1-VH2-L2-VL2-L3-VL1, the second polypeptide has a structure represented by VL3 and the third polypeptide has a structure represented by VH3; optionally wherein the first, second and/or third polypeptide comprises at least one of an Fc region, a CL region, and a CH1 region at the carboxy terminus of the first, second and/or third polypeptide, wherein the at least one Fc region, CL region and CH1 region is linked to the carboxy terminus of the first, second and/or third polypeptide via one or more amino acid linker, or wherein the first, second and/or third polypeptide comprises a CH1-CL, CL-CH1, CH1-Fc, CL-Fc, CL-CH1-Fc, or CH1-CL-Fc, wherein the CH1-CL, CL-CH1, CH1-Fc, CL-Fc, CL-CH1-Fc, or CH1-CL-Fc region is linked to the carboxy terminus of the third polypeptide via one or more amino acid linker, and wherein the CH1, CL and Fc when present in the third polypeptide are linked to each other via one or more amino acid linker. In some aspects, the first polypeptide has a structure represented by VH1-L1-VH2-L2-VL2-L3-VL1, the second polypeptide has a structure represented by VL3 and the third polypeptide has a structure represented by VH3; optionally wherein the first, second and/or third polypeptide comprises at least one of an Fc region, a CL region, and a CH1 region at the carboxy terminus of the first, second and/or third polypeptide, wherein the at least one Fc region, CL region and CH1 region is linked to the carboxy terminus of the first, second and/or third polypeptide via one or more amino acid linker, or wherein the first, second and/or third polypeptide comprises a CH1-CL, CL-CH1, CH1-Fc, CL-Fc, CL-CH1-Fc, or CH1-CL-Fc, wherein the CH1-CL, CL-CH1, CH1-Fc, CL-Fc, CL-CH1-Fc, or CH1-CL-Fc region is linked to the carboxy terminus of the second and third polypeptide via one or more amino acid linker, and wherein the CH1, CL and Fc when present in the second and third polypeptide are linked to each other via one or more amino acid linker.

[0132] In another aspect, the invention is directed to an antigen binding polypeptide complex (e.g., an antibody or antigen binding fragment thereof) comprising a first polypeptide having a structure represented by VL1-VL2-VH2-VH1-Fc, VH1-VH2-VL2-VL1-Fc, VL1-L1-VL2-L2-VH2-L3-VH1-Fc, VH1-L1-VH2-L2-VL2-L3-VH1-Fc, VL1-L1-VL2-L2-VH2-L3-VH1-L4-Fc, or VH1-L1-VH2-L2-VL2-L3-VL1-L4-Fc; and a second polypeptide having a structure represented by VL3-VH3-Fc, VL3-L5-VH3-Fc, VH3-VL3-Fc, or VH3-L5-VL3-Fc; wherein VL1 is a first immunoglobulin light chain variable region; VL2 is a second immunoglobulin light chain variable region; VL3 is a third immunoglobulin light chain variable region; VH1 is a first immunoglobulin heavy chain variable region; VH2 is a second immunoglobulin heavy chain variable region; VH3 is a third immunoglobulin heavy chain variable region; Fc is a region comprising an immunoglobulin heavy chain constant region 2 (CH2), an immunoglobulin heavy chain constant region 3 (CH3), and optionally, an immunoglobulin hinge; and L1, L2, L3, L4 and L5 are amino acid linkers. In some aspects, the first polypeptide has a structure represented by VL1-VL2-VH2-VH1-Fc, VH1-VH2-VL2-VL1-Fc, VL1-L1-VL2-L2-VH2-L3-VH1-Fc, VH1-L1-VH2-L2-VL2-L3-VH1-Fc, VL1-L1-VL2-L2-VH2-L3-VH1-L4-Fc, or VH1-L1-VH2-L2-VL2-L3-VL1-L4-Fc, and a second polypeptide having a structure represented by VL3-VH3-Fc. In some aspects, the first polypeptide has a structure represented by VL1-VL2-VH2-VH1-Fc, VH1-VH2-VL2-VL1-Fc, VL1-L1-VL2-L2-VH2-L3-VH1-Fc, VH1-L1-VH2-L2-VL2-L3-VH1-Fc, VL1-L1-VL2-L2-VH2-L3-VH1-L4-Fc, or VH1-L1-VH2-L2-VL2-L3-VL1-L4-Fc, and a second polypeptide having a structure represented by VL3-L5-VH3-Fc, In some aspects, the first polypeptide has a structure represented by VL1-VL2-VH2-VH1-Fc, VH1-VH2-VL2-VL1-Fc, VL1-L1-VL2-L2-VH2-L3-VH1-Fc, VH1-L1-VH2-L2-VL2-L3-VH1-Fc, VL1-L1-VL2-L2-VH2-L3-VH1-L4-Fc, or VH1-L1-VH2-L2-VL2-L3-VL1-L4-Fc, and a second polypeptide having a structure represented by VH3-VL3-Fc. In some aspects, the first polypeptide has a structure represented by VL1-VL2-VH2-VH1-Fc, VH1-VH2-VL2-VL1-Fc, VL1-L1-VL2-L2-VH2-L3-VH1-Fc, VH1-L1-VH2-L2-VL2-L3-VH1-Fc, VL1-L1-VL2-L2-VH2-L3-VH1-L4-Fc, or VH1-L1-VH2-L2-VL2-L3-VL1-L4-Fc; and a second polypeptide having a structure represented by VH3-L5-VL3-Fc.

[0133] In another aspect, the invention is directed to an antigen binding polypeptide complex (e.g., an antibody or antigen binding fragment thereof) comprising a first polypeptide having a structure represented by VL1-VL2-VH2-VH1-Fc, VH1-VH2-VL2-VL1-Fc, VL1-L1-VL2-L2-VH2-L3-VH1-Fc, VH1-L1-VH2-L2-VL2-L3-VH1-Fc, VL1-L1-VL2-L2-VH2-L3-VH1-L4-Fc, or VH1-L1-VH2-L2-VL2-L3-VL1-L4-Fc; a second polypeptide having a structure represented by VH3-CH1-Fc, VH3-L1-CH1-Fc, VL3-CH1-Fc, or VL3-L1-CH1-Fc; and a third polypeptide having a structure represented by VL3-CL, VL3-L1-CL, VH3-CL, or VH3-L1-CL, wherein VL1 is a first immunoglobulin light chain variable region; VL2 is a second immunoglobulin light chain variable region; VL3 is a third immunoglobulin light chain variable region; VH1 is a first immunoglobulin heavy chain variable region; VH2 is a second immunoglobulin heavy chain variable region; VH3 is a third immunoglobulin heavy chain variable region; Fc is a region comprising an immunoglobulin heavy chain constant region 2 (CH2), an immunoglobulin heavy chain constant region 3 (CH3), and optionally, an immunoglobulin hinge; CH1 is an immunoglobulin heavy chain constant region 1; CL is an immunoglobulin light chain constant region; and L1, L2, L3 and L4 are amino acid linkers. In some aspects, the first polypeptide has a structure represented by VL1-VL2-VH2-VH1-Fc, VH1-VH2-VL2-VL1-Fc, VL1-L1-VL2-L2-VH2-L3-VH1-Fc, VH1-L1-VH2-L2-VL2-L3-VH1-Fc, VL1-L1-VL2-L2-VH2-L3-VH1-L4-Fc, or VH1-L1-VH2-L2-VL2-L3-VL1-L4-Fc, a second polypeptide having a structure represented by VH3-CH1-Fc, and a third polypeptide having a structure represented by VL3-CL. In some aspects, the first polypeptide has a structure represented by VL1-VL2-VH2-VH1-Fc, VH1-VH2-VL2-VL1-Fc, VL1-L1-VL2-L2-VH2-L3-VH1-Fc, VH1-L1-VH2-L2-VL2-L3-VH1-Fc, VL1-L1-VL2-L2-VH2-L3-VH1-L4-Fc, or VH1-L1-VH2-L2-VL2-L3-VL1-L4-Fc, a second polypeptide having a structure represented by VH3-CH1-Fc, and a third polypeptide having a structure represented by VL3-L1-CL. In some aspects, the first polypeptide has a structure represented by VL1-VL2-VH2-VH1-Fc, VH1-VH2-VL2-VL1-Fc, VL1-L1-VL2-L2-VH2-L3-VH1-Fc, VH1-L1-VH2-L2-VL2-L3-VH1-Fc, VL1-L1-VL2-L2-VH2-L3-VH1-L4-Fc, or VH1-L1-VH2-L2-VL2-L3-VL1-L4-Fc, a second polypeptide having a structure represented by VH3-CH1-Fc, and a third polypeptide having a structure represented by VH3-CL. In some aspects, the first polypeptide has a structure represented by VL1-VL2-VH2-VH1-Fc, VH1-VH2-VL2-VL1-Fc, VL1-L1-VL2-L2-VH2-L3-VH1-Fc, VH1-L1-VH2-L2-VL2-L3-VH1-Fc, VL1-L1-VL2-L2-VH2-L3-VH1-L4-Fc, or VH1-L1-VH2-L2-VL2-L3-VL1-L4-Fc, a second polypeptide having a structure represented by VH3-CH1-Fc, and a third polypeptide having a structure represented by VH3-L1-CL. In some aspects, the first polypeptide has a structure represented by VL1-VL2-VH2-VH1-Fc, VH1-VH2-VL2-VL1-Fc, VL1-L1-VL2-L2-VH2-L3-VH1-Fc, VH1-L1-VH2-L2-VL2-L3-VH1-Fc, VL1-L1-VL2-L2-VH2-L3-VH1-L4-Fc, or VH1-L1-VH2-L2-VL2-L3-VL1-L4-Fc, a second polypeptide having a structure represented by VH3-L1-CH1-Fc, and a third polypeptide having a structure represented by VL3-CL. In some aspects, the first polypeptide has a structure represented by VL1-VL2-VH2-VH1-Fc, VH1-VH2-VL2-VL1-Fc, VL1-L1-VL2-L2-VH2-L3-VH1-Fc, VH1-L1-VH2-L2-VL2-L3-VH1-Fc, VL1-L1-VL2-L2-VH2-L3-VH1-L4-Fc, or VH1-L1-VH2-L2-VL2-L3-VL1-L4-Fc, a second polypeptide having a structure represented by VH3-L1-CH1-Fc, and a third polypeptide having a structure represented by VL3-L1-CL. In some aspects, the first polypeptide has a structure represented by VL1-VL2-VH2-VH1-Fc, VH1-VH2-VL2-VL1-Fc, VL1-L1-VL2-L2-VH2-L3-VH1-Fc, VH1-L1-VH2-L2-VL2-L3-VH1-Fc, VL1-L1-VL2-L2-VH2-L3-VH1-L4-Fc, or VH1-L1-VH2-L2-VL2-L3-VL1-L4-Fc, a second polypeptide having a structure represented by VH3-L1-CH1-Fc, and a third polypeptide having a structure represented by VH3-CL. In some aspects, the first polypeptide has a structure represented by VL1-VL2-VH2-VH1-Fc, VH1-VH2-VL2-VL1-Fc, VL1-L1-VL2-L2-VH2-L3-VH1-Fc, VH1-L1-VH2-L2-VL2-L3-VH1-Fc, VL1-L1-VL2-L2-VH2-L3-VH1-L4-Fc, or VH1-L1-VH2-L2-VL2-L3-VL1-L4-Fc, a second polypeptide having a structure represented by VH3-L1-CH1-Fc, and a third polypeptide having a structure represented by VH3-L1-CL. In some aspects, the first polypeptide has a structure represented by VL1-VL2-VH2-VH1-Fc, VH1-VH2-VL2-VL1-Fc, VL1-L1-VL2-L2-VH2-L3-VH1-Fc, VH1-L1-VH2-L2-VL2-L3-VH1-Fc, VL1-L1-VL2-L2-VH2-L3-VH1-L4-Fc, or VH1-L1-VH2-L2-VL2-L3-VL1-L4-Fc, a second polypeptide having a structure represented by VL3-CH1-Fc, and a third polypeptide having a structure represented by VL3-CL. In some aspects, the first polypeptide has a structure represented by VL1-VL2-VH2-VH1-Fc, VH1-VH2-VL2-VL1-Fc, VL1-L1-VL2-L2-VH2-L3-VH1-Fc, VH1-L1-VH2-L2-VL2-L3-VH1-Fc, VL1-L1-VL2-L2-VH2-L3-VH1-L4-Fc, or VH1-L1-VH2-L2-VL2-L3-VL1-L4-Fc, a second polypeptide having a structure represented by VL3-CH1-Fc, and a third polypeptide having a structure represented by VL3-L1-CL. In some aspects, the first polypeptide has a structure represented by VL1-VL2-VH2-VH1-Fe, VH1-VH2-VL2-VL1-Fc, VL1-L1-VL2-L2-VH2-L3-VH1-Fc, VH1-L1-VH2-L2-VL2-L3-VH1-Fc, VL1-L1-VL2-L2-VH2-L3-VH1-L4-Fc, or VH1-L1-VH2-L2-VL2-L3-VL1-L4-Fc, a second polypeptide having a structure represented by VL3-CH1-Fc, and a third polypeptide having a structure represented by VH3-CL. In some aspects, the first polypeptide has a structure represented by VL1-VL2-VH2-VH1-Fc, VH1-VH2-VL2-VL1-Fc, VL1-L1-VL2-L2-VH2-L3-VH1-Fc, VH1-L1-VH2-L2-VL2-L3-VH1-Fc, VL1-L1-VL2-L2-VH2-L3-VH1-L4-Fc, or VH1-L1-VH2-L2-VL2-L3-VL1-L4-Fc, a second polypeptide having a structure represented by VL3-CH1-Fc, and a third polypeptide having a structure represented by VH3-L1-CL. In some aspects, the first polypeptide has a structure represented by VL1-VL2-VH2-VH1-Fc, VH1-VH2-VL2-VL1-Fc, VL1-L1-VL2-L2-VH2-L3-VH1-Fc, VH1-L1-VH2-L2-VL2-L3-VH1-Fc, VL1-L1-VL2-L2-VH2-L3-VH1-L4-Fc, or VH1-L1-VH2-L2-VL2-L3-VL1-L4-Fc, a second polypeptide having a structure represented by VL3-L1-CH1-Fc, and a third polypeptide having a structure represented by VL3-CL. In some aspects, the first polypeptide has a structure represented by VL1-VL2-VH2-VH1-Fc, VH1-VH2-VL2-VL1-Fc, VL1-L1-VL2-L2-VH2-L3-VH1-Fc, VH1-L1-VH2-L2-VL2-L3-VH-Fc, VL1-L1-VL2-L2-VH2-L3-VH-L4-Fc, or VH1-L1-VH2-L2-VL2-L3-VL1-L4-Fc, a second polypeptide having a structure represented by VL3-L1-CH1-Fc, and a third polypeptide having a structure represented by VL3-L1-CL. In some aspects, the first polypeptide has a structure represented by VL1-VL2-VH2-VH1-Fc, VH1-VH2-VL2-VL1-Fc, VL1-L1-VL2-L2-VH2-L3-VH1-Fc, VH1-L1-VH2-L2-VL2-L3-VH-Fc, VL1-L1-VL2-L2-VH2-L3-VH1-L4-Fc, or VH1-L1-VH2-L2-VL2-L3-VL1-L4-Fc, a second polypeptide having a structure represented by VL3-L1-CH1-Fc, and a third polypeptide having a structure represented by VH3-CL. In some aspects, the first polypeptide has a structure represented by VL1-VL2-VH2-VH1-Fc, VH-VH2-VL2-VL1-Fc, VL1-L1-VL2-L2-VH2-L3-VH1-Fc, VH1-L1-VH2-L2-VL2-L3-VH1-Fc, VL1-L1-VL2-L2-VH2-L3-VH-L4-Fc, or VH1-L1-VH2-L2-VL2-L3-VL1-L4-Fc, a second polypeptide having a structure represented by VL3-L1-CH1-Fc, and a third polypeptide having a structure represented by VH3-L1-CL.

[0134] In another aspect, the invention is directed to an antigen binding polypeptide complex (e.g., an antibody or antigen binding fragment thereof) comprising a first polypeptide having a structure represented by VL1-VL2-VH2-VH1-Fc, VH1-VH2-VL2-VL1-Fc, VL1-L1-VL2-L2-VH2-L3-VH1-Fc, VH1-L1-VH2-L2-VL2-L3-VH1-Fc; VL1-L1-VL2-L2-VH2-L3-VH1-L4-Fc; or VH1-L1-VH2-L2-VL2-L3-VL1-L4-Fc; and a second polypeptide having a structure represented by CL-VL3-VH3-CH1-Fc, CL-L1-VL3-L2-VH3-L3-CH1-Fc, CL-VH3-VL3-CH1-Fc; CL-L1-VH3-L2-VL3-L3-CH1-Fc, CH1-VL3-VH3-CL-Fc, CH1-L1-VL3-L2-VH3-L3-CL-Fc, CH1-VH3-VL3-CL-Fc; CH1-L1-VH3-L2-VL3-L3-CL-Fc; wherein VL1 is a first immunoglobulin light chain variable region; VL2 is a second immunoglobulin light chain variable region; VL3 is a third immunoglobulin light chain variable region; VH1 is a first immunoglobulin heavy chain variable region; VH2 is a second immunoglobulin heavy chain variable region; VH3 is a third immunoglobulin heavy chain variable region; Fc is a region comprising an immunoglobulin heavy chain constant region 2 (CH2), an immunoglobulin heavy chain constant region 3 (CH3), and optionally, an immunoglobulin hinge; CH1 is an immunoglobulin heavy chain constant region 1; CL is an immunoglobulin light chain constant region; and L1, L2, L3 and L4 are amino acid linkers. In some aspects, the first polypeptide has a structure represented by VL1-VL2-VH2-VH1-Fc, VH1-VH2-VL2-VL1-Fc, VL1-L1-VL2-L2-VH2-L3-VH1-Fc, VH1-L1-VH2-L2-VL2-L3-VH1-Fc; VL1-L1-VL2-L2-VH2-L3-VH1-L4-Fc; or VH1-L1-VH2-L2-VL2-L3-VL1-L4-Fc, and a second polypeptide having a structure represented by CL-VL3-VH3-CH1-Fc. In some aspects, the first polypeptide has a structure represented by VL1-VL2-VH2-VH1-Fc, VH1-VH2-VL2-VL1-Fc, VL1-L1-VL2-L2-VH2-L3-VH1-Fc, VH1-L1-VH2-L2-VL2-L3-VH1-Fc; VL1-L1-VL2-L2-VH2-L3-VH1-L4-Fc; or VH1-L1-VH2-L2-VL2-L3-VL1-L4-Fc, and a second polypeptide having a structure represented by CL-L1-VL3-L2-VH3-L3-CH1-Fc. In some aspects, the first polypeptide has a structure represented by VL1-VL2-VH2-VH1-Fc, VH1-VH2-VL2-VL1-Fc, VL1-L1-VL2-L2-VH2-L3-VH1-Fc, VH1-L1-VH2-L2-VL2-L3-VH1-Fc; VL1-L1-VL2-L2-VH2-L3-VH1-L4-Fc; or VH1-L1-VH2-L2-VL2-L3-VL1-L4-Fc, and a second polypeptide having a structure represented by CL-VH3-VL3-CH1-Fc. In some aspects, the first polypeptide has a structure represented by VL1-VL2-VH2-VH1-Fc, VH1-VH2-VL2-VL1-Fc, VL1-L1-VL2-L2-VH2-L3-VH1-Fc, VH1-L1-VH2-L2-VL2-L3-VH1-Fc; VL1-L1-VL2-L2-VH2-L3-VH1-L4-Fc; or VH1-L1-VH2-L2-VL2-L3-VL1-L4-Fc, and a second polypeptide having a structure represented by CL-L1-VH3-L2-VL3-L3-CH1-Fc. In some aspects, the first polypeptide has a structure represented by VL1-VL2-VH2-VH1-Fc, VH1-VH2-VL2-VL1-Fc, VL1-L1-VL2-L2-VH2-L3-VH1-Fc, VH1-L1-VH2-L2-VL2-L3-VH1-Fc; VL1-L1-VL2-L2-VH2-L3-VH1-L4-Fc; or VH1-L1-VH2-L2-VL2-L3-VL1-L4-Fc, and a second polypeptide having a structure represented by CH1-VL3-VH3-CL-Fc. In some aspects, the first polypeptide has a structure represented by VL1-VL2-VH2-VH1-Fc, VH1-VH2-VL2-VL1-Fc, VL1-L1-VL2-L2-VH2-L3-VH1-Fc, VH1-L1-VH2-L2-VL2-L3-VH1-Fc; VL1-L1-VL2-L2-VH2-L3-VH1-L4-Fc; or VH1-L1-VH2-L2-VL2-L3-VL1-L4-Fc, and a second polypeptide having a structure represented by CH1-L1-VL3-L2-VH3-L3-CL-Fc. In some aspects, the first polypeptide has a structure represented by VL1-VL2-VH2-VH1-Fc, VH1-VH2-VL2-VL1-Fc, VL1-L1-VL2-L2-VH2-L3-VH1-Fc, VH1-L1-VH2-L2-VL2-L3-VH1-Fc; VL1-L1-VL2-L2-VH2-L3-VH1-L4-Fc; or VH1-L1-VH2-L2-VL2-L3-VL1-L4-Fc, and a second polypeptide having a structure represented by CH1-VH3-VL3-CL-Fc. In some aspects, the first polypeptide has a structure represented by VL1-VL2-VH2-VH1-Fc, VH1-VH2-VL2-VL1-Fc, VL1-L1-VL2-L2-VH2-L3-VH1-Fc, VH1-L1-VH2-L2-VL2-L3-VH1-Fc; VL1-L1-VL2-L2-VH2-L3-VH1-L4-Fc; or VH1-L1-VH2-L2-VL2-L3-VL1-L4-Fc, and a second polypeptide having a structure represented by CH1-L1-VH3-L2-VL3-L3-CL-Fc.

[0135] In another aspect, the invention is directed to an antigen binding polypeptide complex (e.g., an antibody or antigen binding fragment thereof) comprising a first polypeptide having a structure represented by VL1-VL2-VH2-VH1-Fc, VH1-VH2-VL2-VL1-Fc, VL1-L1-VL2-L2-VH2-L3-VH1-Fc, VH1-L1-VH2-L2-VL2-L3-VH1-Fc, VL1-L1-VL2-L2-VH2-L3-VH1-L4-Fc, or VH1-L1-VH2-L2-VL2-L3-VL1-L4-Fc, and a second polypeptide having a structure represented by VL3-CL-VH3-CH1-Fc, VL3-L1-CL-L2-VH3-L3-CH1-Fc, VH3-CL-VL3-CH1-Fc, VH3-L1-CL-L2-VL3-L3-CH1-Fc, VL3-CH1-VH3-CL-Fc, VL3-L1-CH1-L2-VH3-L3-CL-Fc, VH3-CH1-VL3-CL-Fc, or VH3-L1-CH1-L2-VL3-L3-CL-Fc; wherein VL1 is a first immunoglobulin light chain variable region; VL2 is a second immunoglobulin light chain variable region; VL3 is a third immunoglobulin light chain variable region; VH1 is a first immunoglobulin heavy chain variable region; VH2 is a second immunoglobulin heavy chain variable region; VH3 is a third immunoglobulin heavy chain variable region; Fc is a region comprising an immunoglobulin heavy chain constant region 2 (CH2), an immunoglobulin heavy chain constant region 3 (CH3), and optionally, an immunoglobulin hinge; CH1 is an immunoglobulin heavy chain constant region 1; CL is an immunoglobulin light chain constant region; and L1, L2, L3 and L4 are amino acid linkers. In some aspects, the first polypeptide has a structure represented by VL1-VL2-VH2-VH1-Fc, VH1-VH2-VL2-VL1-Fc, VL1-L1-VL2-L2-VH2-L3-VH1-Fc, VH1-L1-VH2-L2-VL2-L3-VH1-Fc, VL1-L1-VL2-L2-VH2-L3-VH1-L4-Fc, or VH1-L1-VH2-L2-VL2-L3-VL1-L4-Fc and a second polypeptide having a structure represented by VL3-CL-VH3-CH1-Fc. In some aspects, the first polypeptide has a structure represented by VL1-VL2-VH2-VH1-Fc, VH1-VH2-VL2-VL1-Fc, VL1-L1-VL2-L2-VH2-L3-VH1-Fc, VH1-L1-VH2-L2-VL2-L3-VH1-Fc, VL1-L1-VL2-L2-VH2-L3-VH1-L4-Fc, or VH1-L1-VH2-L2-VL2-L3-VL1-L4-Fc and a second polypeptide having a structure represented by VL3-L1-CL-L2-VH3-L3-CH1-Fc. In some aspects, the first polypeptide has a structure represented by VL1-VL2-VH2-VH1-Fc, VH1-VH2-VL2-VL1-Fc, VL1-L1-VL2-L2-VH2-L3-VH1-Fc, VH1-L1-VH2-L2-VL2-L3-VH1-Fc, VL1-L1-VL2-L2-VH2-L3-VH1-L4-Fc, or VH1-L1-VH2-L2-VL2-L3-VL1-L4-Fc and a second polypeptide having a structure represented by VH3-CL-VL3-CH1-Fc. In some aspects, the first polypeptide has a structure represented by VL1-VL2-VH2-VH1-Fc, VH1-VH2-VL2-VL1-Fc, VL1-L1-VL2-L2-VH2-L3-VH1-Fc, VH1-L1-VH2-L2-VL2-L3-VH1-Fc, VL1-L1-VL2-L2-VH2-L3-VH1-L4-Fc, or VH1-L1-VH2-L2-VL2-L3-VL1-L4-Fc and a second polypeptide having a structure represented by VH3-L1-CL-L2-VL3-L3-CH1-Fc. In some aspects, the first polypeptide has a structure represented by VL1-VL2-VH2-VH1-Fc, VH1-VH2-VL2-VL1-Fc, VL1-L1-VL2-L2-VH2-L3-VH1-Fc, VH1-L1-VH2-L2-VL2-L3-VH1-Fc, VL1-L1-VL2-L2-VH2-L3-VH1-L4-Fc, or VH1-L1-VH2-L2-VL2-L3-VL1-L4-Fc and a second polypeptide having a structure represented by VL3-CH1-VH3-CL-Fc. In some aspects, the first polypeptide has a structure represented by VL1-VL2-VH2-VH1-Fc, VH1-VH2-VL2-VL1-Fc, VL1-L1-VL2-L2-VH2-L3-VH1-Fc, VH1-L1-VH2-L2-VL2-L3-VH1-Fc, VL1-L1-VL2-L2-VH2-L3-VH1-L4-Fc, or VH1-L1-VH2-L2-VL2-L3-VL1-L4-Fc and a second polypeptide having a structure represented by VL3-L1-CH1-L2-VH3-L3-CL-Fc. In some aspects, the first polypeptide has a structure represented by VL1-VL2-VH2-VH1-Fc, VH1-VH2-VL2-VL1-Fc, VL1-L1-VL2-L2-VH2-L3-VH1-Fc, VH1-L1-VH2-L2-VL2-L3-VH1-Fc, VL1-L1-VL2-L2-VH2-L3-VH1-L4-Fc, or VH1-L1-VH2-L2-VL2-L3-VL1-L4-Fc and a second polypeptide having a structure represented by VH3-CH1-VL3-CL-Fc. In some aspects, the first polypeptide has a structure represented by VL1-VL2-VH2-VH1-Fc, VH1-VH2-VL2-VL1-Fc, VL1-L1-VL2-L2-VH2-L3-VH1-Fc, VH1-L1-VH2-L2-VL2-L3-VH1-Fc, VL1-L1-VL2-L2-VH2-L3-VH1-L4-Fc, or VH1-L1-VH2-L2-VL2-L3-VL1-L4-Fc and a second polypeptide having a structure represented by VH3-L1-CH1-L2-VL3-L3-CL-Fc.

[0136] In another aspect, the invention is directed to an antigen binding polypeptide complex (e.g., an antibody or antigen binding fragment thereof) comprising a first polypeptide having a structure represented by VL1-VL2-VH2-VH1-Fc, VH1-VH2-VL2-VL1-Fc, VL1-L1-VL2-L2-VH2-L3-VH1-Fc, VH1-L1-VH2-L2-VL2-L3-VH1-Fc, VL1-L1-VL2-L2-VH2-L3-VH1-L4-Fc, or VH1-L1-VH2-L2-VL2-L3-VL1-L4-Fc; and a second polypeptide having a structure represented by VL3-VH3-CL-CH1-Fc, VL3-L1-VH3-L2-CL-CH1-Fc, VH3-VL3-CL-CH1-Fc, VH3-L1-VL3-L2-CL-CH1-Fc, VL3-VH3-CH1-CL-Fc, VL3-L1-VH3-L2-CH1-CL-Fc, VH3-VL3-CH1-CL-Fc, or VH3-L1-VL3-L2-CH1-CL-Fc; wherein VL1 is a first immunoglobulin light chain variable region; VL2 is a second immunoglobulin light chain variable region; VL3 is a third immunoglobulin light chain variable region; VH1 is a first immunoglobulin heavy chain variable region; VH2 is a second immunoglobulin heavy chain variable region; VH3 is a third immunoglobulin heavy chain variable region; Fc is a region comprising an immunoglobulin heavy chain constant region 2 (CH2), an immunoglobulin heavy chain constant region 3 (CH3), and optionally, an immunoglobulin hinge; CH1 is an immunoglobulin heavy chain constant region 1; CL is an immunoglobulin light chain constant region; and L1, L2, L3 and L4 are amino acid linkers. In some aspects, the first polypeptide has a structure represented by VL1-VL2-VH2-VH1-Fe, VH1-VH2-VL2-VL1-Fc, VL1-L1-VL2-L2-VH2-L3-VH1-Fc, VH1-L1-VH2-L2-VL2-L3-VH1-Fc, VL1-L1-VL2-L2-VH2-L3-VH1-L4-Fc, or VH1-L1-VH2-L2-VL2-L3-VL1-L4-Fc and a second polypeptide having a structure represented by VL3-VH3-CL-CH1-Fc. In some aspects, the first polypeptide has a structure represented by VL1-VL2-VH2-VH1-Fc, VH1-VH2-VL2-VL1-Fc, VL1-L1-VL2-L2-VH2-L3-VH1-Fc, VH1-L1-VH2-L2-VL2-L3-VH1-Fc, VL1-L1-VL2-L2-VH2-L3-VH1-L4-Fc, or VH1-L1-VH2-L2-VL2-L3-VL1-L4-Fc and a second polypeptide having a structure represented by VL3-L1-VH3-L2-CL-CH1-Fe. In some aspects, the first polypeptide has a structure represented by VL1-VL2-VH2-VH1-Fc, VH1-VH2-VL2-VL1-Fc, VL1-L1-VL2-L2-VH2-L3-VH1-Fc, VH1-L1-VH2-L2-VL2-L3-VH1-Fc, VL1-L1-VL2-L2-VH2-L3-VH1-L4-Fc, or VH1-L1-VH2-L2-VL2-L3-VL1-L4-Fc and a second polypeptide having a structure represented by VH3-VL3-CL-CH1-Fc. In some aspects, the first polypeptide has a structure represented by VL1-VL2-VH2-VH1-Fc, VH1-VH2-VL2-VL1-Fc, VL1-L1-VL2-L2-VH2-L3-VH1-Fc, VH1-L1-VH2-L2-VL2-L3-VH1-Fc, VL1-L1-VL2-L2-VH2-L3-VH1-L4-Fc, or VH1-L1-VH2-L2-VL2-L3-VL1-L4-Fc and a second polypeptide having a structure represented by VH3-L1-VL3-L2-CL-CH1-Fc. In some aspects, the first polypeptide has a structure represented by VL1-VL2-VH2-VH1-Fc, VH1-VH2-VL2-VL1-Fc, VL1-L1-VL2-L2-VH2-L3-VH1-Fc, VH1-L1-VH2-L2-VL2-L3-VH1-Fc, VL1-L1-VL2-L2-VH2-L3-VH1-L4-Fc, or VH1-L1-VH2-L2-VL2-L3-VL1-L4-Fc and a second polypeptide having a structure represented by VL3-VH3-CH1-CL-Fe. In some aspects, the first polypeptide has a structure represented by VL1-VL2-VH2-VH1-Fc, VH1-VH2-VL2-VL1-Fc, VL1-L1-VL2-L2-VH2-L3-VH1-Fc, VH1-L1-VH2-L2-VL2-L3-VH1-Fc, VL1-L1-VL2-L2-VH2-L3-VH1-L4-Fc, or VH1-L1-VH2-L2-VL2-L3-VL1-L4-Fc and a second polypeptide having a structure represented by VL3-L1-VH3-L2-CH1-CL-Fe. In some aspects, the first polypeptide has a structure represented by VL1-VL2-VH2-VH1-Fc, VH1-VH2-VL2-VL1-Fc, VL1-L1-VL2-L2-VH2-L3-VH1-Fc, VH1-L1-VH2-L2-VL2-L3-VH1-Fc, VL1-L1-VL2-L2-VH2-L3-VH1-L4-Fc, or VH1-L1-VH2-L2-VL2-L3-VL1-L4-Fc and a second polypeptide having a structure represented by VH3-VL3-CH1-CL-Fc. In some aspects, the first polypeptide has a structure represented by VL1-VL2-VH2-VH1-Fc, VH1-VH2-VL2-VL1-Fc, VL1-L1-VL2-L2-VH2-L3-VH1-Fc, VH1-L1-VH2-L2-VL2-L3-VH1-Fc, VL1-L1-VL2-L2-VH2-L3-VH1-L4-Fc, or VH1-L1-VH2-L2-VL2-L3-VL1-L4-Fc and a second polypeptide having a structure represented by VH3-L1-VL3-L2-CH1-CL-Fc,

[0137] In another aspect, the invention is directed to an antigen binding polypeptide complex (e.g., an antibody or antigen binding fragment thereof) comprising a first polypeptide having a structure represented by VL1-VL2-VH2-VH1-CH1-Fc, VH1-VH2-VL2-VL1-CH1-Fc, VL1-L1-VL2-L2-VH2-L3-VH1-CH1-Fc, VH1-L1-VH2-L2-VL2-L3-VH1-CH1-Fc, VL1-VL2-VH2-VH1-CL-Fc, VH1-VH2-VL2-VL1-CL-Fc, VL1-L1-VL2-L2-VH2-L3-VH1-CL-Fc, or VH1-L1-VH2-L2-VL2-L3-VH1-CL-Fc; and a second polypeptide having a structure represented by VL3-VH3-CL-Fc, VL3-L1-VH3-L2-CL-Fc, VH3-VL3-CL-Fc, VH3-L1-VL3-L2-CL-Fc, VL3-VH3-CH1-Fc, VL3-L1-VH3-L2-CH1-Fc, VH3-VL3-CH1-Fc, or VH3-L1-VL3-L2-CH1-Fc; wherein VL1 is a first immunoglobulin light chain variable region; VL2 is a second immunoglobulin light chain variable region; VL3 is a third immunoglobulin light chain variable region; VH1 is a first immunoglobulin heavy chain variable region; VH2 is a second immunoglobulin heavy chain variable region; VH3 is a third immunoglobulin heavy chain variable region; Fc is a region comprising an immunoglobulin heavy chain constant region 2 (CH2), an immunoglobulin heavy chain constant region 3 (CH3), and optionally, an immunoglobulin hinge; CH1 is an immunoglobulin heavy chain constant region 1; CL is an immunoglobulin light chain constant region; and L1, L2 and L3 are amino acid linkers. In some aspects, the first polypeptide has a structure represented by VL1-VL2-VH2-VH1-CH1-Fc, VH1-VH2-VL2-VL1-CH1-Fc, VL1-L1-VL2-L2-VH2-L3-VH1-CH1-Fc, VH1-L1-VH2-L2-VL2-L3-VH1-CH1-Fc, VL1-VL2-VH2-VH1-CL-Fc, VH1-VH2-VL2-VL1-CL-Fc, VL1-L1-VL2-L2-VH2-L3-VH1-CL-Fc, or VH1-L1-VH2-L2-VL2-L3-VH1-CL-Fc and a second polypeptide having a structure represented by VL3-VH3-CL-Fc. In some aspects, the first polypeptide has a structure represented by VL1-VL2-VH2-VH1-CH1-Fc, VH1-VH2-VL2-VL1-CH1-Fc, VL1-L1-VL2-L2-VH2-L3-VH1-CH1-Fc, VH1-L1-VH2-L2-VL2-L3-VH1-CH1-Fc, VL1-VL2-VH2-VH1-CL-Fc, VH1-VH2-VL2-VL1-CL-Fc, VL1-L1-VL2-L2-VH2-L3-VH1-CL-Fc, or VH1-L1-VH2-L2-VL2-L3-VH1-CL-Fc and a second polypeptide having a structure represented by VL3-L1-VH3-L2-CL-Fc. In some aspects, the first polypeptide has a structure represented by VL1-VL2-VH2-VH1-CH1-Fc, VH1-VH2-VL2-VL1-CH1-Fc, VL1-L1-VL2-L2-VH2-L3-VH1-CH1-Fc, VH1-L1-VH2-L2-VL2-L3-VH1-CH1-Fc, VL1-VL2-VH2-VH1-CL-Fc, VH1-VH2-VL2-VL1-CL-Fc, VL1-L1-VL2-L2-VH2-L3-VH1-CL-Fc, or VH1-L1-VH2-L2-VL2-L3-VH1-CL-Fc and a second polypeptide having a structure represented by VH3-VL3-CL-Fc. In some aspects, the first polypeptide has a structure represented by VL1-VL2-VH2-VH1-CH1-Fc, VH1-VH2-VL2-VL1-CH1-Fc, VL1-L1-VL2-L2-VH2-L3-VH1-CH1-Fc, VH1-L1-VH2-L2-VL2-L3-VH1-CH1-Fc, VL1-VL2-VH2-VH1-CL-Fc, VH1-VH2-VL2-VL1-CL-Fc, VL1-L1-VL2-L2-VH2-L3-VH1-CL-Fc, or VH1-L1-VH2-L2-VL2-L3-VH1-CL-Fc and a second polypeptide having a structure represented by VH3-L1-VL3-L2-CL-Fc. In some aspects, the first polypeptide has a structure represented by VL1-VL2-VH2-VH1-CH1-Fc, VH1-VH2-VL2-VL1-CH1-Fc, VL1-L1-VL2-L2-VH2-L3-VH1-CH1-Fc, VH1-L1-VH2-L2-VL2-L3-VH1-CH1-Fc, VL1-VL2-VH2-VH1-CL-Fc, VH1-VH2-VL2-VL1-CL-Fc, VL1-L1-VL2-L2-VH2-L3-VH1-CL-Fc, or VH1-L1-VH2-L2-VL2-L3-VH1-CL-Fc and a second polypeptide having a structure represented by VL3-VH3-CH1-Fc. In some aspects, the first polypeptide has a structure represented by VL1-VL2-VH2-VH1-CH1-Fc, VH1-VH2-VL2-VL1-CH1-Fc, VL1-L1-VL2-L2-VH2-L3-VH1-CH1-Fc, VH1-L1-VH2-L2-VL2-L3-VH1-CH1-Fc, VL1-VL2-VH2-VH1-CL-Fc, VH1-VH2-VL2-VL1-CL-Fc, VL1-L1-VL2-L2-VH2-L3-VH1-CL-Fc, or VH1-L1-VH2-L2-VL2-L3-VH1-CL-Fc and a second polypeptide having a structure represented by VL3-L1-VH3-L2-CH1-Fe. In some aspects, the first polypeptide has a structure represented by VL1-VL2-VH2-VH1-CH1-Fc, VH1-VH2-VL2-VL1-CH1-Fc, VL1-L1-VL2-L2-VH2-L3-VH1-CH1-Fc, VH1-L1-VH2-L2-VL2-L3-VH1-CH1-Fc, VL1-VL2-VH2-VH1-CL-Fc, VH1-VH2-VL2-VL1-CL-Fc, VL1-L1-VL2-L2-VH2-L3-VH1-CL-Fe, or VH1-L1-VH2-L2-VL2-L3-VH1-CL-Fc and a second polypeptide having a structure represented by VH3-VL3-CH1-Fe. In some aspects, the first polypeptide has a structure represented by VL1-VL2-VH2-VH1-CH1-Fc, VH1-VH2-VL2-VL1-CH1-Fc, VL1-L1-VL2-L2-VH2-L3-VH1-CH1-Fc, VH1-L1-VH2-L2-VL2-L3-VH1-CH1-Fc, VL1-VL2-VH2-VH1-CL-Fc, VH1-VH2-VL2-VL1-CL-Fc, VL1-L1-VL2-L2-VH2-L3-VH1-CL-Fc, or VH1-L1-VH2-L2-VL2-L3-VH1-CL-Fc and a second polypeptide having a structure represented by VH3-L1-VL3-L2-CH1-Fc.

[0138] In another aspect, the invention is directed to an antigen binding polypeptide complex (e.g., an antibody or antigen binding fragment thereof) comprising a first polypeptide having a structure represented by VL1-VL2-VH2-VH1-CL-CH1-Fc, VL1-L1-VL2-L2-VH2-L3-VH1-CL-CH1-Fc, VH-VH2-VL2-VL1-CL-CH1-Fc, VH1-L1-VH2-L2-VL2-L3-VL1-CL-CH1-Fc, VL1-VL2-VH2-VH1-CH1-CL-Fc, VL1-L1-VL2-L2-VH2-L3-VH1-CH1-CL-Fc, VH1-VH2-VL2-VL1-CH1-CL-Fc, or VH1-L1-VH2-L2-VL2-L3-VL1-CH1-CL-Fc; and a second polypeptide having a structure represented by VL3-VH3-Fc, VL3-L1-VH3-Fc, VH3-VL3-Fc, or VH3-L1-VL3-Fc; wherein VL1 is a first immunoglobulin light chain variable region; VL2 is a second immunoglobulin light chain variable region; VL3 is a third immunoglobulin light chain variable region; VH1 is a first immunoglobulin heavy chain variable region; VH2 is a second immunoglobulin heavy chain variable region; VH3 is a third immunoglobulin heavy chain variable region; Fe is a region comprising an immunoglobulin heavy chain constant region 2 (CH2), an immunoglobulin heavy chain constant region 3 (CH3), and optionally, an immunoglobulin hinge; CH1 is an immunoglobulin heavy chain constant region 1; CL is an immunoglobulin light chain constant region; and L1, L2 and L3 are amino acid linkers. In some aspects, the first polypeptide has a structure represented by VL1-VL2-VH2-VH1-CL-CH1-Fc, VL1-L1-VL2-L2-VH2-L3-VH-CL-CH1-Fc, VH-VH2-VL2-VL1-CL-CH1-Fc, VH1-L1-VH2-L2-VL2-L3-VL1-CL-CH1-Fc, VL1-VL2-VH2-VH1-CH1-CL-Fc, VL1-L1-VL2-L2-VH2-L3-VH-CH1-CL-Fc, VH1-VH2-VL2-VL1-CH1-CL-Fc, or VH1-L1-VH2-L2-VL2-L3-VL1-CH1-CL-Fc and a second polypeptide having a structure represented by VL3-VH3-Fc. In some aspects, the first polypeptide has a structure represented by VL1-VL2-VH2-VH1-CL-CH1-Fc, VL1-L1-VL2-L2-VH2-L3-VH1-CL-CH1-Fc, VH1-VH2-VL2-VL1-CL-CH1-Fc, VH1-L1-VH2-L2-VL2-L3-VL1-CL-CH-Fc, VL1-VL2-VH2-VH1-CH1-CL-Fc, VL1-L1-VL2-L2-VH2-L3-VH1-CH1-CL-Fc, VH-VH2-VL2-VL1-CH1-CL-Fc, or VH1-L1-VH2-L2-VL2-L3-VL1-CH1-CL-Fc and a second polypeptide having a structure represented by VL3-L1-VH3-Fc. In some aspects, the first polypeptide has a structure represented by VL1-VL2-VH2-VH1-CL-CH1-Fc, VL1-L1-VL2-L2-VH2-L3-VH1-CL-CH1-Fc, VH1-VH2-VL2-VL1-CL-CH1-Fc, VH1-L1-VH2-L2-VL2-L3-VL1-CL-CH1-Fc, VL1-VL2-VH2-VH1-CH1-CL-Fc, VL1-L1-VL2-L2-VH2-L3-VH1-CH1-CL-Fc, VH-VH2-VL2-VL1-CH1-CL-Fc, or VH1-L1-VH2-L2-VL2-L3-VL1-CH1-CL-Fc and a second polypeptide having a structure represented by VH3-VL3-Fc. In some aspects, the first polypeptide has a structure represented by VL1-VL2-VH2-VH1-CL-CH1-Fc, VL1-L1-VL2-L2-VH2-L3-VH1-CL-CH1-Fc, VH1-VH2-VL2-VL1-CL-CH1-Fc, VH1-L1-VH2-L2-VL2-L3-VL1-CL-CH1-Fc, VL1-VL2-VH2-VH1-CH1-CL-Fc, VL1-L1-VL2-L2-VH2-L3-VH1-CH1-CL-Fc, VH1-VH2-VL2-VL1-CH1-CL-Fc, or VH1-L1-VH2-L2-VL2-L3-VL1-CH1-CL-Fc and a second polypeptide having a structure represented by VH3-L1-VL3-Fc.

[0139] Any one of the first polypeptides described herein may be combined with any one of the second and/or third polypeptides described herein to form an antigen binding polypeptide complex of the invention.

[0140] All the disclosures relating to the antigen binding polypeptide structures described herein and the antigen binding polypeptide complex structures described herein apply to and can be combined with all the VH and VL regions described herein including all the target antigens described herein and all the VH and VL sequences and CDR sequences described herein.

[0141] In some aspects, an antigen binding polypeptide or antigen binding polypeptide complex of the invention does not specifically bind to an antigen associated with human immunodeficiency virus (HIV) (e.g., an HIV envelope protein) and/or an antigen associated with severe acute respiratory syndrome (SARS).

[0142] In some aspects, the invention is directed to antigen binding polypeptides or antigen binding polypeptide complexes (e.g., antibodies or antigen binding fragments thereof) that specifically bind a viral peptide, protein, polypeptide, or a fragment thereof. In some aspects, the viral peptide, protein, polypeptide, or a fragment thereof is influenza virus neuraminidase, influenza virus hemagglutinin, human respiratory syncytial virus (RSV)-viral proteins, RSV F glycoprotein, RSV G glycoprotein, herpes simplex virus (HSV) viral proteins, herpes simplex virus glycoproteins gB, gC, gD, and gE, chlamydia MOMP and PorB antigens, core protein, matrix protein or other protein of Dengue virus, measles virus hemagglutinin, herpes simplex virus type 2 glycoprotein gB, poliovirus 1 VP1, envelope glycoproteins of HIV 1, hepatitis B surface antigen, diptheria toxin, streptococcus 24M epitope, gonococcal pilin, pseudorabies virus g50 (gpD), pseudorabies virus II (gpB), pseudorabies virus III (gpC), pseudorabies virus glycoprotein H, pseudorabies virus glycoprotein E, transmissible gastroenteritis glycoprotein 195, transmissible gastroenteritis matrix protein, swine rotavirus glycoprotein 38, swine parvovirus capsid protein, Serpulinahydodysenteriae protective antigen, bovine viral diarrhea glycoprotein 55, Newcastle disease virus hemagglutinin-neuraminidase, swine flu hemagglutinin, swine flu neuraminidase, foot and mouth disease virus, hog colera virus, swine influenza virus, African swine fever virus, Mycoplasma liyopneutiioniae, infectious bovine rhinotracheitis virus, infectious bovine rhinotracheitis virus glycoprotein E, glycoprotein G, infectious laryngotracheitis virus, infectious laryngotracheitis virus glycoprotein G or glycoprotein I, a glycoprotein of La Crosse virus, neonatal calf diarrhoea virus, Venezuelan equine encephalomyelitis virus, punta toro virus, murine leukemia virus, mouse mammary tumor virus, hepatitis B virus core protein and hepatitis B virus surface antigen or a fragment or derivative thereof, antigen of equine influenza virus or equine herpes virus, including equine influenza virus type A/Alaska 91 neuraminidase, equine influenza virus typeA/Miami 63 neuraminidase, equine influenza virus type A/Kentucky 81 neuraminidase equine herpes virus type 1 glycoprotein B, and equine herpes virus type 1 glycoprotein D, antigen of bovine respiratory syncytial virus or bovine parainfluenza virus, bovine respiratory syncytial virus attachment protein (BRSV G), bovine respiratory syncytial virus fusion protein (BRSV F), bovine respiratory syncytial virus nucleocapsid protein (BRSVN), bovine parainfluenza virus type 3 fusion protein, bovine parainfluenza virus type 3 hemagglutinin neuraminidase, bovine E viral diarrhoea virus glycoprotein 48 and glycoprotein 53, glycoprotein E of Dengue virus, or glycoprotein E1E2 of human hepatitis C virus. In some aspects, the antigen binding polypeptide or antigen binding polypeptide complex specifically binds at least one epitope on at least one viral protein selected from: influenza virus neuraminidase, influenza virus hemagglutinin, human respiratory syncytial virus (RSV)-viral proteins, RSV F glycoprotein, RSV G glycoprotein, herpes simplex virus (HSV) viral proteins, herpes simplex virus glycoproteins gB, gC, gD, and gE, chlamydia MOMP and PorB antigens, core protein, matrix protein or other protein of Dengue virus, measles virus hemagglutinin, herpes simplex virus type 2 glycoprotein gB, poliovirus 1 VP1, envelope glycoproteins of HIV 1, hepatitis B surface antigen, diptheria toxin, streptococcus 24M epitope, gonococcal pilin, pseudorabies virus g50 (gpD), pseudorabies virus II (gpB), pseudorabies virus III (gpC), pseudorabies virus glycoprotein H, pseudorabies virus glycoprotein E, transmissible gastroenteritis glycoprotein 195, transmissible gastroenteritis matrix protein, swine rotavirus glycoprotein 38, swine parvovirus capsid protein, Serpulinahydodysenteriae protective antigen, bovine viral diarrhea glycoprotein 55, Newcastle disease virus hemagglutinin-neuraminidase, swine flu hemagglutinin, swine flu neuraminidase, foot and mouth disease virus, hog colera virus, swine influenza virus, African swine fever virus, Mycoplasma liyopneutiioniae, infectious bovine rhinotracheitis virus, infectious bovine rhinotracheitis virus glycoprotein E, glycoprotein G, infectious laryngotracheitis virus, infectious laryngotracheitis virus glycoprotein G or glycoprotein I, a glycoprotein of La Crosse virus, neonatal calf diarrhoea virus, Venezuelan equine encephalomyelitis virus, punta toro virus, murine leukemia virus, mouse mammary tumor virus, hepatitis B virus core protein and hepatitis B virus surface antigen or a fragment or derivative thereof, antigen of equine influenza virus or equine herpes virus, including equine influenza virus type A/Alaska 91 neuraminidase, equine influenza virus typeA/Miami 63 neuraminidase, equine influenza virus type A/Kentucky 81 neuraminidase equine herpes virus type 1 glycoprotein B, and equine herpes virus type 1 glycoprotein D, antigen of bovine respiratory syncytial virus or bovine parainfluenza virus, bovine respiratory syncytial virus attachment protein (BRSV G), bovine respiratory syncytial virus fusion protein (BRSV F), bovine respiratory syncytial virus nucleocapsid protein (BRSVN), bovine parainfluenza virus type 3 fusion protein, bovine parainfluenza virus type 3 hemagglutinin neuraminidase, bovine E viral diarrhoea virus glycoprotein 48 and glycoprotein 53, glycoprotein E of Dengue virus, glycoprotein E1E2 of human hepatitis C virus. In some aspects, the antigen binding polypeptide or polypeptide comprised within the antigen binding complex may comprise a VL1, VL2, VL3, VL4, VL5, VL6, VH1, VH2, VH3, VH4, VH5 and/or VH6 that specifically binds to a viral peptide, protein, polypeptide, or a fragment thereof such as influenza virus neuraminidase, influenza virus hemagglutinin, human respiratory syncytial virus (RSV)-viral proteins, RSV F glycoprotein, RSV G glycoprotein, herpes simplex virus (HSV) viral proteins, herpes simplex virus glycoproteins gB, gC, gD, and gE, chlamydia MOMP and PorB antigens, core protein, matrix protein or other protein of Dengue virus, measles virus hemagglutinin, herpes simplex virus type 2 glycoprotein gB, poliovirus 1 VP1, envelope glycoproteins of HIV 1, hepatitis B surface antigen, diptheria toxin, streptococcus 24M epitope, gonococcal pilin, pseudorabies virus g50 (gpD), pseudorabies virus II (gpB), pseudorabies virus III (gpC), pseudorabies virus glycoprotein H, pseudorabies virus glycoprotein E, transmissible gastroenteritis glycoprotein 195, transmissible gastroenteritis matrix protein, swine rotavirus glycoprotein 38, swine parvovirus capsid protein, Serpulinahydodysenteriae protective antigen, bovine viral diarrhea glycoprotein 55, Newcastle disease virus hemagglutinin-neuraminidase, swine flu hemagglutinin, swine flu neuraminidase, foot and mouth disease virus, hog colera virus, swine influenza virus, African swine fever virus, Mycoplasma liyopneutiioniae, infectious bovine rhinotracheitis virus, infectious bovine rhinotracheitis virus glycoprotein E, glycoprotein G, infectious laryngotracheitis virus, infectious laryngotracheitis virus glycoprotein G or glycoprotein I, a glycoprotein of La Crosse virus, neonatal calf diarrhoea virus, Venezuelan equine encephalomyelitis virus, punta toro virus, murine leukemia virus, mouse mammary tumor virus, hepatitis B virus core protein and hepatitis B virus surface antigen or a fragment or derivative thereof, antigen of equine influenza virus or equine herpes virus, including equine influenza virus type A/Alaska 91 neuraminidase, equine influenza virus typeA/Miami 63 neuraminidase, equine influenza virus type A/Kentucky 81 neuraminidase equine herpes virus type 1 glycoprotein B, and equine herpes virus type 1 glycoprotein D, antigen of bovine respiratory syncytial virus or bovine parainfluenza virus, bovine respiratory syncytial virus attachment protein (BRSV G), bovine respiratory syncytial virus fusion protein (BRSV F), bovine respiratory syncytial virus nucleocapsid protein (BRSVN), bovine parainfluenza virus type 3 fusion protein, bovine parainfluenza virus type 3 hemagglutinin neuraminidase, bovine E viral diarrhoea virus glycoprotein 48 and glycoprotein 53, glycoprotein E of Dengue virus, glycoprotein E1E2 of human hepatitis C virus or a combination thereof. For example, the antigen binding polypeptide or polypeptide comprised within the antigen binding complex may comprise a VL1 that specifically binds to influenza virus neuraminidase, influenza virus hemagglutinin, human respiratory syncytial virus (RSV)-viral proteins, RSV F glycoprotein, RSV G glycoprotein, herpes simplex virus (HSV) viral proteins, herpes simplex virus glycoproteins gB, gC, gD, and gE, chlamydia MOMP and PorB antigens, core protein, matrix protein or other protein of Dengue virus, measles virus hemagglutinin, herpes simplex virus type 2 glycoprotein gB, poliovirus 1 VP1, envelope glycoproteins of HIV 1, hepatitis B surface antigen, diptheria toxin, streptococcus 24M epitope, gonococcal pilin, pseudorabies virus g50 (gpD), pseudorabies virus II (gpB), pseudorabies virus III (gpC), pseudorabies virus glycoprotein H, pseudorabies virus glycoprotein E, transmissible gastroenteritis glycoprotein 195, transmissible gastroenteritis matrix protein, swine rotavirus glycoprotein 38, swine parvovirus capsid protein, Serpulinahydodysenteriae protective antigen, bovine viral diarrhea glycoprotein 55, Newcastle disease virus hemagglutinin-neuramnmidase, swine flu hemagglutinin, swine flu neuraminidase, foot and mouth disease virus, hog colera virus, swine influenza virus, African swine fever virus, Mycoplasma liyopneutiioniae, infectious bovine rhinotracheitis virus, infectious bovine rhinotracheitis virus glycoprotein E, glycoprotein G, infectious laryngotracheitis virus, infectious laryngotracheitis virus glycoprotein G or glycoprotein I, a glycoprotein of La Crosse virus, neonatal calf diarrhoea virus, Venezuelan equine encephalomyelitis virus, punta toro virus, murine leukemia virus, mouse mammary tumor virus, hepatitis B virus core protein and hepatitis B virus surface antigen or a fragment or derivative thereof, antigen of equine influenza virus or equine herpes virus, including equine influenza virus type A/Alaska 91 neuraminidase, equine influenza virus typeA/Miami 63 neuraminidase, equine influenza virus type A/Kentucky 81 neuramnmidase equine herpes virus type 1 glycoprotein B, and equine herpes virus type 1 glycoprotein D, antigen of bovine respiratory syncytial virus or bovine parainfluenza virus, bovine respiratory syncytial virus attachment protein (BRSV G), bovine respiratory syncytial virus fusion protein (BRSV F), bovine respiratory syncytial virus nucleocapsid protein (BRSVN), bovine parainfluenza virus type 3 fusion protein, bovine parainfluenza virus type 3 hemagglutinin neuraminidase, bovine E viral diarrhoea virus glycoprotein 48 and glycoprotein 53, glycoprotein E of Dengue virus, glycoprotein E1E2 of human hepatitis C virus or a combination thereof. For example, the antigen binding polypeptide or polypeptide comprised within the antigen binding complex may comprise a VL2 that specifically binds to influenza virus neuraminidase, influenza virus hemagglutinin, human respiratory syncytial virus (RSV)-viral proteins, RSV F glycoprotein, RSV G glycoprotein, herpes simplex virus (HSV) viral proteins, herpes simplex virus glycoproteins gB, gC, gD, and gE, chlamydia MOMP and PorB antigens, core protein, matrix protein or other protein of Dengue virus, measles virus hemagglutinin, herpes simplex virus type 2 glycoprotein gB, poliovirus 1 VP1, envelope glycoproteins of HIV 1, hepatitis B surface antigen, diptheria toxin, streptococcus 24M epitope, gonococcal pilin, pseudorabies virus g50 (gpD), pseudorabies virus II (gpB), pseudorabies virus III (gpC), pseudorabies virus glycoprotein H, pseudorabies virus glycoprotein E, transmissible gastroenteritis glycoprotein 195, transmissible gastroenteritis matrix protein, swine rotavirus glycoprotein 38, swine parvovirus capsid protein, Serpulinahydodysenteriae protective antigen, bovine viral diarrhea glycoprotein 55, Newcastle disease virus hemagglutinin-neuraminidase, swine flu hemagglutinin, swine flu neuraminidase, foot and mouth disease virus, hog colera virus, swine influenza virus, African swine fever virus, Mycoplasma liyopneutiioniae, infectious bovine rhinotracheitis virus, infectious bovine rhinotracheitis virus glycoprotein E, glycoprotein G, infectious laryngotracheitis virus, infectious laryngotracheitis virus glycoprotein G or glycoprotein I, a glycoprotein of La Crosse virus, neonatal calf diarrhoea virus, Venezuelan equine encephalomyelitis virus, punta toro virus, murine leukemia virus, mouse mammary tumor virus, hepatitis B virus core protein and hepatitis B virus surface antigen or a fragment or derivative thereof, antigen of equine influenza virus or equine herpes virus, including equine influenza virus type A/Alaska 91 neuraminidase, equine influenza virus typeA/Miami 63 neuraminidase, equine influenza virus type A/Kentucky 81 neuraminidase equine herpes virus type 1 glycoprotein B, and equine herpes virus type 1 glycoprotein D, antigen of bovine respiratory syncytial virus or bovine parainfluenza virus, bovine respiratory syncytial virus attachment protein (BRSV G), bovine respiratory syncytial virus fusion protein (BRSV F), bovine respiratory syncytial virus nucleocapsid protein (BRSVN), bovine parainfluenza virus type 3 fusion protein, bovine parainfluenza virus type 3 hemagglutinin neuraminidase, bovine E viral diarrhoea virus glycoprotein 48 and glycoprotein 53, glycoprotein E of Dengue virus, glycoprotein E1E2 of human hepatitis C virus or a combination thereof. For example, the antigen binding polypeptide or polypeptide comprised within the antigen binding complex may comprise a VL3 that specifically binds to influenza virus neuraminidase, influenza virus hemagglutinin, human respiratory syncytial virus (RSV)-viral proteins, RSV F glycoprotein, RSV G glycoprotein, herpes simplex virus (HSV) viral proteins, herpes simplex virus glycoproteins gB, gC, gD, and gE, chlamydia MOMP and PorB antigens, core protein, matrix protein or other protein of Dengue virus, measles virus hemagglutinin, herpes simplex virus type 2 glycoprotein gB, poliovirus 1 VP1, envelope glycoproteins of HIV 1, hepatitis B surface antigen, diptheria toxin, streptococcus 24M epitope, gonococcal pilin, pseudorabies virus g50 (gpD), pseudorabies virus II (gpB), pseudorabies virus III (gpC), pseudorabies virus glycoprotein H, pseudorabies virus glycoprotein E, transmissible gastroenteritis glycoprotein 195, transmissible gastroenteritis matrix protein, swine rotavirus glycoprotein 38, swine parvovirus capsid protein, Serpulinahydodysenteriae protective antigen, bovine viral diarrhea glycoprotein 55, Newcastle disease virus hemagglutinin-neuramnmidase, swine flu hemagglutinin, swine flu neuraminidase, foot and mouth disease virus, hog colera virus, swine influenza virus, African swine fever virus, Mycoplasma liyopneutiioniae, infectious bovine rhinotracheitis virus, infectious bovine rhinotracheitis virus glycoprotein E, glycoprotein G, infectious laryngotracheitis virus, infectious laryngotracheitis virus glycoprotein G or glycoprotein I, a glycoprotein of La Crosse virus, neonatal calf diarrhoea virus, Venezuelan equine encephalomyelitis virus, punta toro virus, murine leukemia virus, mouse mammary tumor virus, hepatitis B virus core protein and hepatitis B virus surface antigen or a fragment or derivative thereof, antigen of equine influenza virus or equine herpes virus, including equine influenza virus type A/Alaska 91 neuraminidase, equine influenza virus typeA/Miami 63 neuraminidase, equine influenza virus type A/Kentucky 81 neuraminidase equine herpes virus type 1 glycoprotein B, and equine herpes virus type 1 glycoprotein D, antigen of bovine respiratory syncytial virus or bovine parainfluenza virus, bovine respiratory syncytial virus attachment protein (BRSV G), bovine respiratory syncytial virus fusion protein (BRSV F), bovine respiratory syncytial virus nucleocapsid protein (BRSVN), bovine parainfluenza virus type 3 fusion protein, bovine parainfluenza virus type 3 hemagglutinin neuraminidase, bovine E viral diarrhoea virus glycoprotein 48 and glycoprotein 53, glycoprotein E of Dengue virus, glycoprotein E1E2 of human hepatitis C virus or a combination thereof. For example, the antigen binding polypeptide or polypeptide comprised within the antigen binding complex may comprise a VL4 that specifically binds to influenza virus neuramnnidase, influenza virus hemagglutinin, human respiratory syncytial virus (RSV)-viral proteins, RSV F glycoprotein, RSV G glycoprotein, herpes simplex virus (HSV) viral proteins, herpes simplex virus glycoproteins gB, gC, gD, and gE, chlamydia MOMP and PorB antigens, core protein, matrix protein or other protein of Dengue virus, measles virus hemagglutinin, herpes simplex virus type 2 glycoprotein gB, poliovirus 1 VP1, envelope glycoproteins of HIV 1, hepatitis B surface antigen, diptheria toxin, streptococcus 24M epitope, gonococcal pilin, pseudorabies virus g50 (gpD), pseudorabies virus II (gpB), pseudorabies virus III (gpC), pseudorabies virus glycoprotein H, pseudorabies virus glycoprotein E, transmissible gastroenteritis glycoprotein 195, transmissible gastroenteritis matrix protein, swine rotavirus glycoprotein 38, swine parvovirus capsid protein, Serpulinahydodysenteriae protective antigen, bovine viral diarrhea glycoprotein 55, Newcastle disease virus hemagglutinin-neuraminidase, swine flu hemagglutinin, swine flu neuraminidase, foot and mouth disease virus, hog colera virus, swine influenza virus, African swine fever virus, Mycoplasma liyopneutiioniae, infectious bovine rhinotracheitis virus, infectious bovine rhinotracheitis virus glycoprotein E, glycoprotein G, infectious laryngotracheitis virus, infectious laryngotracheitis virus glycoprotein G or glycoprotein I, a glycoprotein of La Crosse virus, neonatal calf diarrhoea virus, Venezuelan equine encephalomyelitis virus, punta toro virus, murine leukemia virus, mouse mammary tumor virus, hepatitis B virus core protein and hepatitis B virus surface antigen or a fragment or derivative thereof, antigen of equine influenza virus or equine herpes virus, including equine influenza virus type A/Alaska 91 neuraminidase, equine influenza virus typeA/Miami 63 neuraminidase, equine influenza virus type A/Kentucky 81 neuraminidase equine herpes virus type 1 glycoprotein B, and equine herpes virus type 1 glycoprotein D, antigen of bovine respiratory syncytial virus or bovine parainfluenza virus, bovine respiratory syncytial virus attachment protein (BRSV G), bovine respiratory syncytial virus fusion protein (BRSV F), bovine respiratory syncytial virus nucleocapsid protein (BRSVN), bovine parainfluenza virus type 3 fusion protein, bovine parainfluenza virus type 3 hemagglutinin neuraminidase, bovine E viral diarrhoea virus glycoprotein 48 and glycoprotein 53, glycoprotein E of Dengue virus, glycoprotein E1E2 of human hepatitis C virus or a combination thereof. For example, the antigen binding polypeptide or polypeptide comprised within the antigen binding complex may comprise a VL5 that specifically binds to influenza virus neuraminidase, influenza virus hemagglutinin, human respiratory syncytial virus (RSV)-viral proteins, RSV F glycoprotein, RSV G glycoprotein, herpes simplex virus (HSV) viral proteins, herpes simplex virus glycoproteins gB, gC, gD, and gE, chlamydia MOMP and PorB antigens, core protein, matrix protein or other protein of Dengue virus, measles virus hemagglutinin, herpes simplex virus type 2 glycoprotein gB, poliovirus 1 VP1, envelope glycoproteins of HIV 1, hepatitis B surface antigen, diptheria toxin, streptococcus 24M epitope, gonococcal pilin, pseudorabies virus g50 (gpD), pseudorabies virus II (gpB), pseudorabies virus III (gpC), pseudorabies virus glycoprotein H, pseudorabies virus glycoprotein E, transmissible gastroenteritis glycoprotein 195, transmissible gastroenteritis matrix protein, swine rotavirus glycoprotein 38, swine parvovirus capsid protein, Serpulinahydodysenteriae protective antigen, bovine viral diarrhea glycoprotein 55, Newcastle disease virus hemagglutinin-neuramnmidase, swine flu hemagglutinin, swine flu neuraminidase, foot and mouth disease virus, hog colera virus, swine influenza virus, African swine fever virus, Mycoplasma liyopneutiioniae, infectious bovine rhinotracheitis virus, infectious bovine rhinotracheitis virus glycoprotein E, glycoprotein G, infectious laryngotracheitis virus, infectious laryngotracheitis virus glycoprotein G or glycoprotein I, a glycoprotein of La Crosse virus, neonatal calf diarrhoea virus, Venezuelan equine encephalomyelitis virus, punta toro virus, murine leukemia virus, mouse mammary tumor virus, hepatitis B virus core protein and hepatitis B virus surface antigen or a fragment or derivative thereof, antigen of equine influenza virus or equine herpes virus, including equine influenza virus type A/Alaska 91 neuraminidase, equine influenza virus typeA/Miami 63 neuraminidase, equine influenza virus type A/Kentucky 81 neuramnmidase equine herpes virus type 1 glycoprotein B, and equine herpes virus type 1 glycoprotein D, antigen of bovine respiratory syncytial virus or bovine parainfluenza virus, bovine respiratory syncytial virus attachment protein (BRSV G), bovine respiratory syncytial virus fusion protein (BRSV F), bovine respiratory syncytial virus nucleocapsid protein (BRSVN), bovine parainfluenza virus type 3 fusion protein, bovine parainfluenza virus type 3 hemagglutinin neuraminidase, bovine E viral diarrhoea virus glycoprotein 48 and glycoprotein 53, glycoprotein E of Dengue virus, glycoprotein E1E2 of human hepatitis C virus or a combination thereof. For example, the antigen binding polypeptide or polypeptide comprised within the antigen binding complex may comprise a VL6 that specifically binds to influenza virus neuraminidase, influenza virus hemagglutinin, human respiratory syncytial virus (RSV)-viral proteins, RSV F glycoprotein, RSV G glycoprotein, herpes simplex virus (HSV) viral proteins, herpes simplex virus glycoproteins gB, gC, gD, and gE, chlamydia MOMP and PorB antigens, core protein, matrix protein or other protein of Dengue virus, measles virus hemagglutinin, herpes simplex virus type 2 glycoprotein gB, poliovirus 1 VP1, envelope glycoproteins of HIV 1, hepatitis B surface antigen, diptheria toxin, streptococcus 24M epitope, gonococcal pilin, pseudorabies virus g50 (gpD), pseudorabies virus II (gpB), pseudorabies virus III (gpC), pseudorabies virus glycoprotein H, pseudorabies virus glycoprotein E, transmissible gastroenteritis glycoprotein 195, transmissible gastroenteritis matrix protein, swine rotavirus glycoprotein 38, swine parvovirus capsid protein, Serpulinahydodysenteriae protective antigen, bovine viral diarrhea glycoprotein 55, Newcastle disease virus hemagglutinin-neuraminidase, swine flu hemagglutinin, swine flu neuraminidase, foot and mouth disease virus, hog colera virus, swine influenza virus, African swine fever virus, Mycoplasma liyopneutiioniae, infectious bovine rhinotracheitis virus, infectious bovine rhinotracheitis virus glycoprotein E, glycoprotein G, infectious laryngotracheitis virus, infectious laryngotracheitis virus glycoprotein G or glycoprotein I, a glycoprotein of La Crosse virus, neonatal calf diarrhoea virus, Venezuelan equine encephalomyelitis virus, punta toro virus, murine leukemia virus, mouse mammary tumor virus, hepatitis B virus core protein and hepatitis B virus surface antigen or a fragment or derivative thereof, antigen of equine influenza virus or equine herpes virus, including equine influenza virus type A/Alaska 91 neuraminidase, equine influenza virus typeA/Miami 63 neuraminidase, equine influenza virus type A/Kentucky 81 neuraminidase equine herpes virus type 1 glycoprotein B, and equine herpes virus type 1 glycoprotein D, antigen of bovine respiratory syncytial virus or bovine parainfluenza virus, bovine respiratory syncytial virus attachment protein (BRSV G), bovine respiratory syncytial virus fusion protein (BRSV F), bovine respiratory syncytial virus nucleocapsid protein (BRSVN), bovine parainfluenza virus type 3 fusion protein, bovine parainfluenza virus type 3 hemagglutinin neuraminidase, bovine E viral diarrhoea virus glycoprotein 48 and glycoprotein 53, glycoprotein E of Dengue virus, glycoprotein E1E2 of human hepatitis C virus or a combination thereof. For example, the antigen binding polypeptide or polypeptide comprised within the antigen binding complex may comprise a VH1 that specifically binds to influenza virus neuraminidase, influenza virus hemagglutinin, human respiratory syncytial virus (RSV)-viral proteins, RSV F glycoprotein, RSV G glycoprotein, herpes simplex virus (HSV) viral proteins, herpes simplex virus glycoproteins gB, gC, gD, and gE, chlamydia MOMP and PorB antigens, core protein, matrix protein or other protein of Dengue virus, measles virus hemagglutinin, herpes simplex virus type 2 glycoprotein gB, poliovirus 1 VP1, envelope glycoproteins of HIV 1, hepatitis B surface antigen, diptheria toxin, streptococcus 24M epitope, gonococcal pilin, pseudorabies virus g50 (gpD), pseudorabies virus II (gpB), pseudorabies virus III (gpC), pseudorabies virus glycoprotein H, pseudorabies virus glycoprotein E, transmissible gastroenteritis glycoprotein 195, transmissible gastroenteritis matrix protein, swine rotavirus glycoprotein 38, swine parvovirus capsid protein, Serpulinahydodysenteriae protective antigen, bovine viral diarrhea glycoprotein 55, Newcastle disease virus hemagglutinin-neuramnmidase, swine flu hemagglutinin, swine flu neuraminidase, foot and mouth disease virus, hog colera virus, swine influenza virus, African swine fever virus, Mycoplasma liyopneutiioniae, infectious bovine rhinotracheitis virus, infectious bovine rhinotracheitis virus glycoprotein E, glycoprotein G, infectious laryngotracheitis virus, infectious laryngotracheitis virus glycoprotein G or glycoprotein I, a glycoprotein of La Crosse virus, neonatal calf diarrhoea virus, Venezuelan equine encephalomyelitis virus, punta toro virus, murine leukemia virus, mouse mammary tumor virus, hepatitis B virus core protein and hepatitis B virus surface antigen or a fragment or derivative thereof, antigen of equine influenza virus or equine herpes virus, including equine influenza virus type A/Alaska 91 neuraminidase, equine influenza virus typeA/Miami 63 neuraminidase, equine influenza virus type A/Kentucky 81 neuramnmidase equine herpes virus type 1 glycoprotein B, and equine herpes virus type 1 glycoprotein D, antigen of bovine respiratory syncytial virus or bovine parainfluenza virus, bovine respiratory syncytial virus attachment protein (BRSV G), bovine respiratory syncytial virus fusion protein (BRSV F), bovine respiratory syncytial virus nucleocapsid protein (BRSVN), bovine parainfluenza virus type 3 fusion protein, bovine parainfluenza virus type 3 hemagglutinin neuraminidase, bovine E viral diarrhoea virus glycoprotein 48 and glycoprotein 53, glycoprotein E of Dengue virus, glycoprotein E1E2 of human hepatitis C virus or a combination thereof. For example, the antigen binding polypeptide or polypeptide comprised within the antigen binding complex may comprise a VH2 that specifically binds to influenza virus neuraminidase, influenza virus hemagglutinin, human respiratory syncytial virus (RSV)-viral proteins, RSV F glycoprotein, RSV G glycoprotein, herpes simplex virus (HSV) viral proteins, herpes simplex virus glycoproteins gB, gC, gD, and gE, chlamydia MOMP and PorB antigens, core protein, matrix protein or other protein of Dengue virus, measles virus hemagglutinin, herpes simplex virus type 2 glycoprotein gB, poliovirus 1 VP1, envelope glycoproteins of HIV 1, hepatitis B surface antigen, diptheria toxin, streptococcus 24M epitope, gonococcal pilin, pseudorabies virus g50 (gpD), pseudorabies virus II (gpB), pseudorabies virus III (gpC), pseudorabies virus glycoprotein H, pseudorabies virus glycoprotein E, transmissible gastroenteritis glycoprotein 195, transmissible gastroenteritis matrix protein, swine rotavirus glycoprotein 38, swine parvovirus capsid protein, Serpulinahydodysenteriae protective antigen, bovine viral diarrhea glycoprotein 55, Newcastle disease virus hemagglutinin-neuraminidase, swine flu hemagglutinin, swine flu neuraminidase, foot and mouth disease virus, hog colera virus, swine influenza virus, African swine fever virus, Mycoplasma liyopneutiioniae, infectious bovine rhinotracheitis virus, infectious bovine rhinotracheitis virus glycoprotein E, glycoprotein G, infectious laryngotracheitis virus, infectious laryngotracheitis virus glycoprotein G or glycoprotein I, a glycoprotein of La Crosse virus, neonatal calf diarrhoea virus, Venezuelan equine encephalomyelitis virus, punta toro virus, murine leukemia virus, mouse mammary tumor virus, hepatitis B virus core protein and hepatitis B virus surface antigen or a fragment or derivative thereof, antigen of equine influenza virus or equine herpes virus, including equine influenza virus type A/Alaska 91 neuraminidase, equine influenza virus typeA/Miami 63 neuraminidase, equine influenza virus type A/Kentucky 81 neuraminidase equine herpes virus type 1 glycoprotein B, and equine herpes virus type 1 glycoprotein D, antigen of bovine respiratory syncytial virus or bovine parainfluenza virus, bovine respiratory syncytial virus attachment protein (BRSV G), bovine respiratory syncytial virus fusion protein (BRSV F), bovine respiratory syncytial virus nucleocapsid protein (BRSVN), bovine parainfluenza virus type 3 fusion protein, bovine parainfluenza virus type 3 hemagglutinin neuraminidase, bovine E viral diarrhoea virus glycoprotein 48 and glycoprotein 53, glycoprotein E of Dengue virus, glycoprotein E1E2 of human hepatitis C virus or a combination thereof. For example, the antigen binding polypeptide or polypeptide comprised within the antigen binding complex may comprise a VH3 that specifically binds to influenza virus neuraminidase, influenza virus hemagglutinin, human respiratory syncytial virus (RSV)-viral proteins, RSV F glycoprotein, RSV G glycoprotein, herpes simplex virus (HSV) viral proteins, herpes simplex virus glycoproteins gB, gC, gD, and gE, chlamydia MOMP and PorB antigens, core protein, matrix protein or other protein of Dengue virus, measles virus hemagglutinin, herpes simplex virus type 2 glycoprotein gB, poliovirus 1 VP1, envelope glycoproteins of HIV 1, hepatitis B surface antigen, diptheria toxin, streptococcus 24M epitope, gonococcal pilin, pseudorabies virus g50 (gpD), pseudorabies virus II (gpB), pseudorabies virus III (gpC), pseudorabies virus glycoprotein H, pseudorabies virus glycoprotein E, transmissible gastroenteritis glycoprotein 195, transmissible gastroenteritis matrix protein, swine rotavirus glycoprotein 38, swine parvovirus capsid protein, Serpulinahydodysenteriae protective antigen, bovine viral diarrhea glycoprotein 55, Newcastle disease virus hemagglutinin-neuranmnidase, swine flu hemagglutinin, swine flu neuraminidase, foot and mouth disease virus, hog colera virus, swine influenza virus, African swine fever virus, Mycoplasma liyopneutiioniae, infectious bovine rhinotracheitis virus, infectious bovine rhinotracheitis virus glycoprotein E, glycoprotein G, infectious laryngotracheitis virus, infectious laryngotracheitis virus glycoprotein G or glycoprotein I, a glycoprotein of La Crosse virus, neonatal calf diarrhoea virus, Venezuelan equine encephalomyelitis virus, punta toro virus, murine leukemia virus, mouse mammary tumor virus, hepatitis B virus core protein and hepatitis B virus surface antigen or a fragment or derivative thereof, antigen of equine influenza virus or equine herpes virus, including equine influenza virus type A/Alaska 91 neuraminidase, equine influenza virus typeA/Miami 63 neuraminidase, equine influenza virus type A/Kentucky 81 neuramnmidase equine herpes virus type 1 glycoprotein B, and equine herpes virus type 1 glycoprotein D, antigen of bovine respiratory syncytial virus or bovine parainfluenza virus, bovine respiratory syncytial virus attachment protein (BRSV G), bovine respiratory syncytial virus fusion protein (BRSV F), bovine respiratory syncytial virus nucleocapsid protein (BRSVN), bovine parainfluenza virus type 3 fusion protein, bovine parainfluenza virus type 3 hemagglutinin neuraminidase, bovine E viral diarrhoea virus glycoprotein 48 and glycoprotein 53, glycoprotein E of Dengue virus, glycoprotein E1E2 of human hepatitis C virus or a combination thereof. For example, the antigen binding polypeptide or polypeptide comprised within the antigen binding complex may comprise a VH4 that specifically binds to influenza virus neuraminidase, influenza virus hemagglutinin, human respiratory syncytial virus (RSV)-viral proteins, RSV F glycoprotein, RSV G glycoprotein, herpes simplex virus (HSV) viral proteins, herpes simplex virus glycoproteins gB, gC, gD, and gE, chlamydia MOMP and PorB antigens, core protein, matrix protein or other protein of Dengue virus, measles virus hemagglutinin, herpes simplex virus type 2 glycoprotein gB, poliovirus 1 VP1, envelope glycoproteins of HIV 1, hepatitis B surface antigen, diptheria toxin, streptococcus 24M epitope, gonococcal pilin, pseudorabies virus g50 (gpD), pseudorabies virus II (gpB), pseudorabies virus III (gpC), pseudorabies virus glycoprotein H, pseudorabies virus glycoprotein E, transmissible gastroenteritis glycoprotein 195, transmissible gastroenteritis matrix protein, swine rotavirus glycoprotein 38, swine parvovirus capsid protein, Serpulinahydodysenteriae protective antigen, bovine viral diarrhea glycoprotein 55, Newcastle disease virus hemagglutinin-neuraminidase, swine flu hemagglutinin, swine flu neuraminidase, foot and mouth disease virus, hog colera virus, swine influenza virus, African swine fever virus, Mycoplasma liyopneutiioniae, infectious bovine rhinotracheitis virus, infectious bovine rhinotracheitis virus glycoprotein E, glycoprotein G, infectious laryngotracheitis virus, infectious laryngotracheitis virus glycoprotein G or glycoprotein I, a glycoprotein of La Crosse virus, neonatal calf diarrhoea virus, Venezuelan equine encephalomyelitis virus, punta toro virus, murine leukemia virus, mouse mammary tumor virus, hepatitis B virus core protein and hepatitis B virus surface antigen or a fragment or derivative thereof, antigen of equine influenza virus or equine herpes virus, including equine influenza virus type A/Alaska 91 neuraminidase, equine influenza virus typeA/Miami 63 neuraminidase, equine influenza virus type A/Kentucky 81 neuraminidase equine herpes virus type 1 glycoprotein B, and equine herpes virus type 1 glycoprotein D, antigen of bovine respiratory syncytial virus or bovine parainfluenza virus, bovine respiratory syncytial virus attachment protein (BRSV G), bovine respiratory syncytial virus fusion protein (BRSV F), bovine respiratory syncytial virus nucleocapsid protein (BRSVN), bovine parainfluenza virus type 3 fusion protein, bovine parainfluenza virus type 3 hemagglutinin neuraminidase, bovine E viral diarrhoea virus glycoprotein 48 and glycoprotein 53, glycoprotein E of Dengue virus, glycoprotein E1E2 of human hepatitis C virus or a combination thereof. For example, the antigen binding polypeptide or polypeptide comprised within the antigen binding complex may comprise a VH5 that specifically binds to influenza virus neuraminidase, influenza virus hemagglutinin, human respiratory syncytial virus (RSV)-viral proteins, RSV F glycoprotein, RSV G glycoprotein, herpes simplex virus (HSV) viral proteins, herpes simplex virus glycoproteins gB, gC, gD, and gE, chlamydia MOMP and PorB antigens, core protein, matrix protein or other protein of Dengue virus, measles virus hemagglutinin, herpes simplex virus type 2 glycoprotein gB, poliovirus 1 VP1, envelope glycoproteins of HIV 1, hepatitis B surface antigen, diptheria toxin, streptococcus 24M epitope, gonococcal pilin, pseudorabies virus g50 (gpD), pseudorabies virus II (gpB), pseudorabies virus III (gpC), pseudorabies virus glycoprotein H, pseudorabies virus glycoprotein E, transmissible gastroenteritis glycoprotein 195, transmissible gastroenteritis matrix protein, swine rotavirus glycoprotein 38, swine parvovirus capsid protein, Serpulinahydodysenteriae protective antigen, bovine viral diarrhea glycoprotein 55, Newcastle disease virus hemagglutinin-neuramnmidase, swine flu hemagglutinin, swine flu neuraminidase, foot and mouth disease virus, hog colera virus, swine influenza virus, African swine fever virus, Mycoplasma liyopneutiioniae, infectious bovine rhinotracheitis virus, infectious bovine rhinotracheitis virus glycoprotein E, glycoprotein G, infectious laryngotracheitis virus, infectious laryngotracheitis virus glycoprotein G or glycoprotein I, a glycoprotein of La Crosse virus, neonatal calf diarrhoea virus, Venezuelan equine encephalomyelitis virus, punta toro virus, murine leukemia virus, mouse mammary tumor virus, hepatitis B virus core protein and hepatitis B virus surface antigen or a fragment or derivative thereof, antigen of equine influenza virus or equine herpes virus, including equine influenza virus type A/Alaska 91 neuraminidase, equine influenza virus typeA/Miami 63 neuraminidase, equine influenza virus type A/Kentucky 81 neuramnmidase equine herpes virus type 1 glycoprotein B, and equine herpes virus type 1 glycoprotein D, antigen of bovine respiratory syncytial virus or bovine parainfluenza virus, bovine respiratory syncytial virus attachment protein (BRSV G), bovine respiratory syncytial virus fusion protein (BRSV F), bovine respiratory syncytial virus nucleocapsid protein (BRSVN), bovine parainfluenza virus type 3 fusion protein, bovine parainfluenza virus type 3 hemagglutinin neuraminidase, bovine E viral diarrhoea virus glycoprotein 48 and glycoprotein 53, glycoprotein E of Dengue virus, glycoprotein E1E2 of human hepatitis C virus or a combination thereof. For example, the antigen binding polypeptide or polypeptide comprised within the antigen binding complex may comprise a VH6 that specifically binds to influenza virus neuraminidase, influenza virus hemagglutinin, human respiratory syncytial virus (RSV)-viral proteins, RSV F glycoprotein, RSV G glycoprotein, herpes simplex virus (HSV) viral proteins, herpes simplex virus glycoproteins gB, gC, gD, and gE, chlamydia MOMP and PorB antigens, core protein, matrix protein or other protein of Dengue virus, measles virus hemagglutinin, herpes simplex virus type 2 glycoprotein gB, poliovirus 1 VP1, envelope glycoproteins of HIV 1, hepatitis B surface antigen, diptheria toxin, streptococcus 24M epitope, gonococcal pilin, pseudorabies virus g50 (gpD), pseudorabies virus II (gpB), pseudorabies virus III (gpC), pseudorabies virus glycoprotein H, pseudorabies virus glycoprotein E, transmissible gastroenteritis glycoprotein 195, transmissible gastroenteritis matrix protein, swine rotavirus glycoprotein 38, swine parvovirus capsid protein, Serpulinahydodysenteriae protective antigen, bovine viral diarrhea glycoprotein 55, Newcastle disease virus hemagglutinin-neuraminidase, swine flu hemagglutinin, swine flu neuraminidase, foot and mouth disease virus, hog colera virus, swine influenza virus, African swine fever virus, Mycoplasma liyopneutiioniae, infectious bovine rhinotracheitis virus, infectious bovine rhinotracheitis virus glycoprotein E, glycoprotein G, infectious laryngotracheitis virus, infectious laryngotracheitis virus glycoprotein G or glycoprotein I, a glycoprotein of La Crosse virus, neonatal calf diarrhoea virus, Venezuelan equine encephalomyelitis virus, punta toro virus, murine leukemia virus, mouse mammary tumor virus, hepatitis B virus core protein and hepatitis B virus surface antigen or a fragment or derivative thereof, antigen of equine influenza virus or equine herpes virus, including equine influenza virus type A/Alaska 91 neuraminidase, equine influenza virus typeA/Miami 63 neuraminidase, equine influenza virus type A/Kentucky 81 neuraminidase equine herpes virus type 1 glycoprotein B, and equine herpes virus type 1 glycoprotein D, antigen of bovine respiratory syncytial virus or bovine parainfluenza virus, bovine respiratory syncytial virus attachment protein (BRSV G), bovine respiratory syncytial virus fusion protein (BRSV F), bovine respiratory syncytial virus nucleocapsid protein (BRSVN), bovine parainfluenza virus type 3 fusion protein, bovine parainfluenza virus type 3 hemagglutinin neuraminidase, bovine E viral diarrhoea virus glycoprotein 48 and glycoprotein 53, glycoprotein E of Dengue virus, glycoprotein E1E2 of human hepatitis C virus or a combination thereof. The antigen binding polypeptide described herein or the polypeptides of the antigen binding polypeptide complex described herein may comprise any combination of VH1, VH2, VH3, VH4, VH5, VH6, VL1, VL2, VL3, VL4, VL5 and/or VL6 that bind the targets described herein. In some aspects, the antigen binding polypeptide or antigen binding polypeptide complex (e.g., antibodies or antigen binding fragments thereof) specifically binds to a viral peptide, protein, polypeptide, or a fragment of influenza virus neuraminidase. In some aspects, the antigen binding polypeptide or antigen binding polypeptide complex (e.g., antibodies or antigen binding fragments thereof) specifically binds to a viral peptide, protein, polypeptide, or a fragment of influenza virus hemagglutinin. In some aspects, the antigen binding polypeptide or antigen binding polypeptide complex (e.g., antibodies or antigen binding fragments thereof) specifically binds to a viral peptide, protein, polypeptide, or a fragment of a human respiratory syncytial virus (RSV)-viral protein. In some aspects, the antigen binding polypeptide or antigen binding polypeptide complex (e.g., antibodies or antigen binding fragments thereof) specifically binds to a viral peptide, protein, polypeptide, or a fragment of RSV F glycoprotein. In some aspects, the antigen binding polypeptide or antigen binding polypeptide complex (e.g., antibodies or antigen binding fragments thereof) specifically binds to a viral peptide, protein, polypeptide, or a fragment of RSV G glycoprotein. In some aspects, the antigen binding polypeptide or antigen binding polypeptide complex (e.g., antibodies or antigen binding fragments thereof) specifically binds to a viral peptide, protein, polypeptide, or a fragment of a herpes simplex virus (HSV) viral protein. In some aspects, the antigen binding polypeptide or antigen binding polypeptide complex (e.g., antibodies or antigen binding fragments thereof) specifically binds to a viral peptide, protein, polypeptide, or a fragment of the herpes simplex virus glycoprotein gB, gC, gD, or gE. In some aspects, the antigen binding polypeptide or antigen binding polypeptide complex (e.g., antibodies or antigen binding fragments thereof) specifically binds to a viral peptide, protein, polypeptide, or a fragment of chlamydia MOMP. In some aspects, the antigen binding polypeptide or antigen binding polypeptide complex (e.g., antibodies or antigen binding fragments thereof) specifically binds to a viral peptide, protein, polypeptide, or a fragment of a PorB antigen. In some aspects, the antigen binding polypeptide or antigen binding polypeptide complex (e.g., antibodies or antigen binding fragments thereof) specifically binds to a viral peptide, protein, polypeptide, or a fragment of core protein, matrix protein or other protein of Dengue virus. In some aspects, the antigen binding polypeptide or antigen binding polypeptide complex (e.g., antibodies or antigen binding fragments thereof) specifically binds to a viral peptide, protein, polypeptide, or a fragment of measles virus hemagglutinin. In some aspects, the antigen binding polypeptide or antigen binding polypeptide complex (e.g., antibodies or antigen binding fragments thereof) specifically binds to a viral peptide, protein, polypeptide, or a fragment of simplex virus type 2 glycoprotein gB. In some aspects, the antigen binding polypeptide or antigen binding polypeptide complex (e.g., antibodies or antigen binding fragments thereof) specifically binds to a viral peptide, protein, polypeptide, or a fragment of poliovirus 1 VP1. In some aspects, the antigen binding polypeptide or antigen binding polypeptide complex (e.g., antibodies or antigen binding fragments thereof) specifically binds to a viral peptide, protein, polypeptide, or a fragment of an envelope glycoprotein of HIV 1. In some aspects, the antigen binding polypeptide or antigen binding polypeptide complex (e.g., antibodies or antigen binding fragments thereof) specifically binds to a viral peptide, protein, polypeptide, or a fragment of hepatitis B surface antigen. In some aspects, the antigen binding polypeptide or antigen binding polypeptide complex (e.g., antibodies or antigen binding fragments thereof) specifically binds to a viral peptide, protein, polypeptide, or a fragment of diptheria toxin. In some aspects, the antigen binding polypeptide or antigen binding polypeptide complex (e.g., antibodies or antigen binding fragments thereof) specifically binds to a viral peptide, protein, polypeptide, or a fragment of streptococcus 24M epitope. In some aspects, the antigen binding polypeptide or antigen binding polypeptide complex (e.g., antibodies or antigen binding fragments thereof) specifically binds to a viral peptide, protein, polypeptide, or a fragment of gonococcal pilin. In some aspects, the antigen binding polypeptide or antigen binding polypeptide complex (e.g., antibodies or antigen binding fragments thereof) specifically binds to a viral peptide, protein, polypeptide, or a fragment of pseudorabies virus g50 (gpD). In some aspects, the antigen binding polypeptide or antigen binding polypeptide complex (e.g., antibodies or antigen binding fragments thereof) specifically binds to a viral peptide, protein, polypeptide, or a fragment of pseudorabies virus II (gpB). In some aspects, the antigen binding polypeptide or antigen binding polypeptide complex (e.g., antibodies or antigen binding fragments thereof) specifically binds to a viral peptide, protein, polypeptide, or a fragment of pseudorabies virus III (gpC). In some aspects, the antigen binding polypeptide or antigen binding polypeptide complex (e.g., antibodies or antigen binding fragments thereof) specifically binds to a viral peptide, protein, polypeptide, or a fragment of pseudorabies virus glycoprotein H. In some aspects, the antigen binding polypeptide or antigen binding polypeptide complex (e.g., antibodies or antigen binding fragments thereof) specifically binds to a viral peptide, protein, polypeptide, or a fragment of pseudorabies virus glycoprotein E. In some aspects, the antigen binding polypeptide or antigen binding polypeptide complex (e.g., antibodies or antigen binding fragments thereof) specifically binds to a viral peptide, protein, polypeptide, or a fragment of transmissible gastroenteritis glycoprotein 195. In some aspects, the antigen binding polypeptide or antigen binding polypeptide complex (e.g., antibodies or antigen binding fragments thereof) specifically binds to a viral peptide, protein, polypeptide, or a fragment of transmissible gastroenteritis matrix protein. In some aspects, the antigen binding polypeptide or antigen binding polypeptide complex (e.g., antibodies or antigen binding fragments thereof) specifically binds to a viral peptide, protein, polypeptide, or a fragment of swine rotavirus glycoprotein 38. In some aspects, the antigen binding polypeptide or antigen binding polypeptide complex (e.g., antibodies or antigen binding fragments thereof) specifically binds to a viral peptide, protein, polypeptide, or a fragment of swine parvovirus capsid protein. In some aspects, the antigen binding polypeptide or antigen binding polypeptide complex (e.g., antibodies or antigen binding fragments thereof) specifically binds to a viral peptide, protein, polypeptide, or a fragment of Serpulinahydodysenteriae protective antigen. In some aspects, the antigen binding polypeptide or antigen binding polypeptide complex (e.g., antibodies or antigen binding fragments thereof) specifically binds to a viral peptide, protein, polypeptide, or a fragment of bovine viral diarrhea glycoprotein 55. In some aspects, the antigen binding polypeptide or antigen binding polypeptide complex (e.g., antibodies or antigen binding fragments thereof) specifically binds to a viral peptide, protein, polypeptide, or a fragment of Newcastle disease virus hemagglutinin-neuraminidase. In some aspects, the antigen binding polypeptide or antigen binding polypeptide complex (e.g., antibodies or antigen binding fragments thereof) specifically binds to a viral peptide, protein, polypeptide, or a fragment of swine flu hemagglutinin. In some aspects, the antigen binding polypeptide or antigen binding polypeptide complex (e.g., antibodies or antigen binding fragments thereof) specifically binds to a viral peptide, protein, polypeptide, or a fragment of swine flu neuraminidase. In some aspects, the antigen binding polypeptide or antigen binding polypeptide complex (e.g., antibodies or antigen binding fragments thereof) specifically binds to a viral peptide, protein, polypeptide, or a fragment of foot and mouth disease virus. In some aspects, the antigen binding polypeptide or antigen binding polypeptide complex (e.g., antibodies or antigen binding fragments thereof) specifically binds to a viral peptide, protein, polypeptide, or a fragment of hog colera virus. In some aspects, the antigen binding polypeptide or antigen binding polypeptide complex (e.g., antibodies or antigen binding fragments thereof) specifically binds to a viral peptide, protein, polypeptide, or a fragment of swine influenza virus. In some aspects, the antigen binding polypeptide or antigen binding polypeptide complex (e.g., antibodies or antigen binding fragments thereof) specifically binds to a viral peptide, protein, polypeptide, or a fragment of African swine fever virus. In some aspects, the antigen binding polypeptide or antigen binding polypeptide complex (e.g., antibodies or antigen binding fragments thereof) specifically binds to a viral peptide, protein, polypeptide, or a fragment of Mycoplasma liyopneutiioniae. In some aspects, the antigen binding polypeptide or antigen binding polypeptide complex (e.g., antibodies or antigen binding fragments thereof) specifically binds to a viral peptide, protein, polypeptide, or a fragment of In some aspects, the antigen binding polypeptide or antigen binding polypeptide complex (e.g., antibodies or antigen binding fragments thereof) specifically binds to a viral peptide, protein, polypeptide, or a fragment of infectious bovine rhinotracheitis virus. In some aspects, the antigen binding polypeptide or antigen binding polypeptide complex (e.g., antibodies or antigen binding fragments thereof) specifically binds to a viral peptide, protein, polypeptide, or a fragment of infectious bovine rhinotracheitis virus glycoprotein E. In some aspects, the antigen binding polypeptide or antigen binding polypeptide complex (e.g., antibodies or antigen binding fragments thereof) specifically binds to a viral peptide, protein, polypeptide, or a fragment of glycoprotein G. In some aspects, the antigen binding polypeptide or antigen binding polypeptide complex (e.g., antibodies or antigen binding fragments thereof) specifically binds to a viral peptide, protein, polypeptide, or a fragment of infectious laryngotracheitis virus. In some aspects, the antigen binding polypeptide or antigen binding polypeptide complex (e.g., antibodies or antigen binding fragments thereof) specifically binds to a viral peptide, protein, polypeptide, or a fragment of an infectious laryngotracheitis virus glycoprotein G or glycoprotein I. In some aspects, the antigen binding polypeptide or antigen binding polypeptide complex (e.g., antibodies or antigen binding fragments thereof) specifically binds to a viral peptide, protein, polypeptide, or a fragment of a glycoprotein of La Crosse virus. In some aspects, the antigen binding polypeptide or antigen binding polypeptide complex (e.g., antibodies or antigen binding fragments thereof) specifically binds to a viral peptide, protein, polypeptide, or a fragment of neonatal calf diarrhoea virus. In some aspects, the antigen binding polypeptide or antigen binding polypeptide complex (e.g., antibodies or antigen binding fragments thereof) specifically binds to a viral peptide, protein, polypeptide, or a fragment of Venezuelan equine encephalomyelitis virus. In some aspects, the antigen binding polypeptide or antigen binding polypeptide complex (e.g., antibodies or antigen binding fragments thereof) specifically binds to a viral peptide, protein, polypeptide, or a fragment of punta toro virus. In some aspects, the antigen binding polypeptide or antigen binding polypeptide complex (e.g., antibodies or antigen binding fragments thereof) specifically binds to a viral peptide, protein, polypeptide, or a fragment of murine leukemia virus. In some aspects, the antigen binding polypeptide or antigen binding polypeptide complex (e.g., antibodies or antigen binding fragments thereof) specifically binds to a viral peptide, protein, polypeptide, or a fragment of mouse mammary tumor virus. In some aspects, the antigen binding polypeptide or antigen binding polypeptide complex (e.g., antibodies or antigen binding fragments thereof) specifically binds to a viral peptide, protein, polypeptide, or a fragment of hepatitis B virus core protein or hepatitis B virus surface antigen. In some aspects, the antigen binding polypeptide or antigen binding polypeptide complex (e.g., antibodies or antigen binding fragments thereof) specifically binds to a viral peptide, protein, polypeptide, or a fragment of equine influenza virus or equine herpes virus, such as equine influenza virus type A/Alaska 91 neuraminidase, equine influenza virus typeA/Miami 63 neuraminidase, equine influenza virus type A/Kentucky 81 neuraminidase equine herpes virus type 1 glycoprotein B, and equine herpes virus type 1 glycoprotein D. In some aspects, the antigen binding polypeptide or antigen binding polypeptide complex (e.g., antibodies or antigen binding fragments thereof) specifically binds to a viral peptide, protein, polypeptide, or a fragment of bovine respiratory syncytial virus or bovine parainfluenza virus. In some aspects, the antigen binding polypeptide or antigen binding polypeptide complex (e.g., antibodies or antigen binding fragments thereof) specifically binds to a viral peptide, protein, polypeptide, or a fragment of bovine respiratory syncytial virus attachment protein (BRSV G). In some aspects, the antigen binding polypeptide or antigen binding polypeptide complex (e.g., antibodies or antigen binding fragments thereof) specifically binds to a viral peptide, protein, polypeptide, or a fragment of bovine respiratory syncytial virus fusion protein (BRSV F). In some aspects, the antigen binding polypeptide or antigen binding polypeptide complex (e.g., antibodies or antigen binding fragments thereof) specifically binds to a viral peptide, protein, polypeptide, or a fragment of bovine respiratory syncytial virus nucleocapsid protein (BRSVN). In some aspects, the antigen binding polypeptide or antigen binding polypeptide complex (e.g., antibodies or antigen binding fragments thereof) specifically binds to a viral peptide, protein, polypeptide, or a fragment of bovine parainfluenza virus type 3 fusion protein. In some aspects, the antigen binding polypeptide or antigen binding polypeptide complex (e.g., antibodies or antigen binding fragments thereof) specifically binds to a viral peptide, protein, polypeptide, or a fragment of ovine parainfluenza virus type 3 hemagglutinin neuraminidase. In some aspects, the antigen binding polypeptide or antigen binding polypeptide complex (e.g., antibodies or antigen binding fragments thereof) specifically binds to a viral peptide, protein, polypeptide, or a fragment of bovine E viral diarrhoea virus glycoprotein 48 or glycoprotein 53. In some aspects, the antigen binding polypeptide or antigen binding polypeptide complex (e.g., antibodies or antigen binding fragments thereof) specifically binds to a viral peptide, protein, polypeptide, or a fragment of glycoprotein E of Dengue virus. In some aspects, the antigen binding polypeptide or antigen binding polypeptide complex (e.g., antibodies or antigen binding fragments thereof) specifically binds to a viral peptide, protein, polypeptide, or a fragment of glycoprotein E1E2 of human hepatitis C virus. Any of the antigen binding polypeptide structures and any of the antigen binding polypeptide complex structures described herein may be used to target one or more of the viral targets described herein.

[0143] Sequences from antibodies or antibody fragments to known spike protein epitopes on any virus or overexpressed receptors on a cancer cell can be inserted into the constructs disclosed herein to produce multispecific multivalent polypeptides and polypeptide complexes which bind to the epitopes on the virus or virus variants and to T cells which engage the virus or cancer cell. The Immune Epitope Database and Analysis Resource provides lists of epitope sequences associated with specific antigens and infectious organism. Known VL/VH pairs and CDRs are selected and chosen to insert into a plasmid or plasmids encoding a fully functional multispecific multivalent antibody. In a preferred embodiment, the source of a preferred initial antibody or monoclonal antibody is from a highly resistant subject that has developed broadly neutralizing antibodies resistant across evolving infectious viruses or cancer cells.

[0144] Viral antigens present in Influenza A virus include matrix protein 1, hemagglutinin, nucleoprotein RNA-directed RNA polymerase catalytic subunit, polymerase acidic protein, nuclear export protein, and polymerase basic protein 2. Epitope sequences are inclusive of, for example, those selected from GILGFVFTL (SEQ ID NO:406); PKYVKFQNTLKLAT (SEQ ID NO:407); SRYWAIRTR (SEQ ID NO:408); CTELKLSDY (SEQ ID NO:409); ELRSRYWAI (SEQ ID NO:410); ILRGSVAHK (SEQ ID NO:411); VSDGGPNLY (SEQ ID NO:412); FMYSEFHFI (SEQ ID NO:413); AIMDKNIIL (SEQ ID NO:414); NMLSTVLGV (SEQ ID NO:415); FLKDVMESM (SEQ ID NO:416); LPFEKSTVM (SEQ ID NO:417); and FVRQCFNPM (SEQ ID NO:418) etc. as disclosed in the above database.

[0145] Viral antigens present in Influenza B virus are selected from the group consisting of nucleoprotein, hemagglutinin; non-structural protein 1; neuraminidase and matrix protein 1. Epitopes from such proteins are selected from, for example, KLGEFYNQMM (SEQ ID NO:419); AVLLSNEGIINSEDE (SEQ ID NO:420); AVLLSNEGIINSEDEH (SEQ ID NO:421); AYDQSGRL (SEQ ID NO:422); AYDQSGRLV (SEQ ID NO:423); FPIMHDRTKI+OX(M4) (SEQ ID NO:424); ITKNLNSLSELEVKN (SEQ ID NO:425); ITKNLNSLSELEVKNLQ (SEQ ID NO:426); LAVLLSNEGIINSEDE (SEQ ID NO:427); LAVLLSNEGIINSEDEH (SEQ ID NO:428); and LPQSGRIVV (SEQ ID NO:429), as disclosed in the above database.

[0146] Antigens are selected from the group consisting of Influenza viruses and surface glycoproteins: H5N1 influenza: H1N1: H1N2:H3N2: HA (hemagglutinin surface glycoprotein); NA (neuraminidase surface glycoprotein); H5 and H7. Others include: Respiratory syncytial virus (RSV). Antigens associated with RSV include protein M2-1; matrix protein, fusion glycoprotein F0; nucleoprotein and small hydrophobic protein. Epitopes present on these proteins are inclusive of SYIGSINNI (SEQ ID NO:430); NAITNAKII (SEQ ID NO:431); KYKNAVTEL (SEQ ID NO:432); NSELLSLINDMPITNDQKKLMSNN (SEQ ID NO:433); NPKASLLSL (SEQ ID NO:434); VYNTVISYI (SEQ ID NO:435); TYMLTNSELL (SEQ ID NO:436): WAICKRIPNKKPG (SEQ ID NO:437); and KNRGIIKTFSN (SEQ ID NO:438) etc.;

[0147] Chlamydia. Antigens associated with Chlamydia trachomatis include major outer membrane porin, serovar D; chaperonin GroEL; uncharacterized protein (UniProt:Q9Z7F3) probably oxidoreductase CT_610 and inclusion membrane protein A. Epitope sequences include, for example, TLNPTI (SEQ ID NO:439); ATLVVNRIRGGF (SEQ ID NO:440); LNPTIA (SEQ ID NO:441); SANNDAEIGNLI (SEQ ID NO:442); PETISDPENRNKPSAE (SEQ ID NO:443); AEGQLG (SEQ ID NO:444); ARKLLLDNL (SEQ ID NO:445); ASFVNPIYL (SEQ ID NO:446); DVVDGMNFNRGY (SEQ ID NO:447); NMFTPYIGV (SEQ ID NO:448), and NLVGLIGVKGSSIAADQLPNVGIT (SEQ ID NO:449) etc.;

[0148] Adenovirdiae. Antigens associated with human adenovirus C include early E1A protein; hexon protein; DNA-binding protein; E1B 55 kDa protein and DNA polymerase. Epitope sequences include, for example, SGPSNTPPEI (SEQ ID NO:450), TDLGQNLLY (SEQ ID NO:451); LTDLGQNLLY (SEQ ID NO:452); FALSNAEDL (SEQ ID NO:453); DEPTLLYVLFEVFDV (SEQ ID NO:454); KYSPSNVKI (SEQ ID NO:455); MPNRNYIAF (SEQ ID NO:456); VDCYINLGARWSLDY (SEQ ID NO:457); VNIRNCCYI (SEQ ID NO:458); RNFQPMSRQVVDDTKYKDYQQVGILHQHNN (SEQ ID NO:459); LPKLTPFAL (SEQ ID NO:460); and FQRPTISSNSHAIFR (SEQ ID NO:461) etc;

[0149] Mastadenovirus. Human mastadenovirus C has various antigens associated with viral infection. These include early E1A protein; hexon protein; DNA binding protein; E1B 55 kDa protein; DNA polymerase and fiber protein. Epitope sequences are inclusive of, for example, SGPSNTPPEI (SEQ ID NO:462); TDLGQNLLY (SEQ ID NO:463); LTDLGQNLLY (SEQ ID NO:464); FALSNAEDL (SEQ ID NO:465); DEPTLLYVLFEVFDV (SEQ ID NO:466); KYSPSNVKI (SEQ ID NO:467); MPNRPNYIAF (SEQ ID NO:468); VDCYINLGARWSLDY (SEQ ID NO:469); LPKLTPFAL (SEQ ID NO:470); FQRPTISSNSHAIFR (SEQ ID NO:471) and GKYTTETFATNSYTPSYIAQE (SEQ ID NO:472) etc;

[0150] Aviadenovirus. Fowl adenovirus C has hexon protein as one of the antigens with epitopes DYDDYNIGTT (SEQ ID NO:473); KISGVFPNP (SEQ ID NO:474); PLAPKESMFN (SEQ ID NO:475); and ETLLIEDDVSGQGKELGVNLNPAGPITADEQGL (SEQ ID NO:476) etc;

[0151] Herpesviridae. Antigens depend upon particular organism with human herpesvirus 5 (human cytomegalovirus) and human herpesvirus 4 (Epstein Barr Virus) being predominant focus with antigens ranging from 65 kDa phosphoprotein; mRNA export factor ICP27 homolog; envelope glycoprotein B; latent membrane protein 2; Epstein-Barr nuclear antigen 3; M123; trans-activitor protein BZLF1; immediate early protein IE1; Epstein-Barr nuclear antigen 4; Epstein-Barr nuclear antigen 1; DNA polymerase processivity factor; ribonucleoside-diphosphate reductase large subunit-like protein; replication and transcription activator; and latent membrane protein 1 with epitope sequences selected from, for example, NLVPMVATV (SEQ ID NO:477); GLCTLVAML (SEQ ID NO:478); TPRVTGGGAM (SEQ ID NO:479); SSIEFARL (SEQ ID NO:480); CLGGLLTMV (SEQ ID NO:481); FLRGRAYGL (SEQ ID NO:482); TPHFMPTNL (SEQ ID NO:483); RAKFKQLL (SEQ ID NO:484); RPPIFIRRL (SEQ ID NO:485); VLEETSVML (SEQ ID NO:486); IVTDFSVIK (SEQ ID NO:487); IPSINVHHY (SEQ ID NO:488); QYDPVAALF (SEQ ID NO:489); HPVGEADYFEY (SEQ ID NO:490); VTEHDTLLY (SEQ ID NO:491); HGIRNASFI (SEQ ID NO:492); AVFDRKSDAK (SEQ ID NO:493); TPLHEQHGM (SEQ ID NO:494); YSEHPTFTSQY (SEQ ID NO:495); YVLDHLIVV (SEQ ID NO:496); YLLEMLWRL (SEQ ID NO:497); FLYALALLL (SEQ ID NO:498); QAKWRLQTL (SEQ ID NO:499): ELRRKMMYM (SEQ ID NO:500); and RPHERNGFTVL (SEQ ID NO:501) etc;

[0152] Herpes simplex virus 1 (human herpesvirus 1). Antigens include envelope glycoprotein B; ribonucleoside-diphosphate reductase large subunit; envelope glycoprotein D; tegument protein UL46; mRNA export factor; capsid vertex component 2 and ribonucleoside-diphosphate reductase small subunit. Epitope sequences include SSIEFARL (SEQ ID NO:502); QTFDRGRL (SEQ ID NO:503); SLKMADPNRFRGKDLP (SEQ ID NO:504); QPPSLPITVYYAVLERACTSVLLNAPSEAPQIVR (SEQ ID NO:505); RLNELLAYV (SEQ ID NO:506); RMLGDVMAV (SEQ ID NO:507); KYALADASLKMADPNRFRGKDLP (SEQ ID NO:508); SLPITVTTA (SEQ ID NO:509); DPEDSALL (SEQ ID NO:510); and DYATLGVGV (SEQ ID NO:511) etc;

[0153] Herpes simplex virus 2 (human herpesvirus 2). Antigens include Tegument protein VP22; envelope glycoprotein B; tegument protein VP16; Tegument protein UL47; tegument protein UL46; tegument protein VP16; envelope glycoprotein G; capsid vertex component 2; capsid scaffolding protein; envelope glycoprotein D; mRNA export factor; major viral transcription factor ICP4 homolog with antigen epitope sequences selected from, for example, RPRGEVRFL (SEQ ID NO:512); SSIEFARL (SEQ ID NO:513); EEVDMTPADALDDFD (SEQ ID NO:514); GLADTVVAC (SEQ ID NO:515); ASDSLNNEY (SEQ ID NO:516); DFEFEQMFTDAMG (SEQ ID NO:517); EVDMTPADAL (SEQ ID NO:518); PEEFEGAGDGEPPEDDDS (SEQ ID NO:519); FLWEDQTLL (SEQ ID NO:520); FLVDAIVRVA (SEQ ID NO:521); GPADAPPGSPAPPPPEHRGG (SEQ ID NO:522); GPHETITAL (SEQ ID NO:523); KYALADPSLKMADPNRFRGKNLP (SEQ ID NO:524); NNYGSTIEGLL (SEQ ID NO:525); PEEFEGAGDGEPPEDDDSAT (SEQ ID NO:526); PPLYATGRLSQAQLMPSPPM (SEQ ID NO:527); TQPELVPEDPED (SEQ ID NO:528); YTSTLLPPELSDTTN (SEQ ID NO:529): DPSLKMADPNRFRGKNLPVL (SEQ ID NO:530); PELVPEDPEDSALLEDPAGT (SEQ ID NO:531); HGPSLYRTF (SEQ ID NO:532); NKRVFCAAVGRLA (SEQ ID NO:533); PMRARPRGEVRFL (SEQ ID NO:534); VFCAAVGRL (SEQ ID NO:535); and LGNRLCGPATAAWAG (SEQ ID NO:536) and as further disclosed in the Immune Epitope database;

[0154] Herpes simplex virus 5 (human herpesvirus 5). Antigens include 65 kDa phosphoprotein; immediate early protein IE1; envelope glycoprotein H; other human herpesvirus 5 protein and envelope glycoprotein B. Epitope sequences include NLVPMVATV (SEQ ID NO:537); TMYGGISLL (SEQ ID NO:538); VLEETSVML (SEQ ID NO:539); LDPHAFHLLL (SEQ ID NO:540); RIFAELEGV (SEQ ID NO:541); RPHERNGFTVL (SEQ ID NO:542); VFPTKDVAL (SEQ ID NO:543); VLAELVKQI (SEQ ID NO:544); VLPHETRLL (SEQ ID NO:545); KRLDVCRAKMGYM (SEQ ID NO:546); GGGAMAGASTSAGRKRKS (SEQ ID NO:547); AALFFFDID (SEQ ID NO:548); AGILARNLVPMVATV (SEQ ID NO:549); ALFFFDIDLL (SEQ ID NO:550); ANETIYNTTLKYGDV (SEQ ID NO:551); ARAKKDELRRKMMYM (SEQ ID NO:552); ARNLVPMVATVQGQN (SEQ ID NO:553); ASTAAPPYTNEQAYQMLLAL (SEQ ID NO:554); AVGGAVASV (SEQ ID NO:555); DEEEAIVAYT (SEQ ID NO:556); DEEEAIVAYTL (SEQ ID NO:557); DPVAALFFF (SEQ ID NO:558); EEAIVAYTL (SEQ ID NO:559); EECQLPSLKIFIAGNSAY (SEQ ID NO:560) or EEEAIVAYTL (SEQ ID NO:561) and others disclosed in public databases such as the Immune Epitope database;

[0155] Other antigens include Herpes simplex virus 6; Leviviridae; Levivirus; Enterobacteria phase MS2; Allolevirus; Poxviridae; Chordopoxvirinae (cowpox virus or vaccinia virus); antigens include CPXV202 protein; intermediate transcription factor 3 small subunit; putative nuclease G5; interferon antagonist C7; protein A47; major core protein 4b; DNA directed RNA polymerase 147 kDa polypeptide; mRNA capping enzyme regulatory subunit; envelope protein H3; protein B6; telomere binding protein I1; protein K3; poxin; protein A19; assembly protein G7; frotein F12; protein A46; protein A6; DNA polymerase; profiling; RNA binding protein E3; and serine protease inhibitor 1. The antigens have epitope sequences selected from TSYKFESV (SEQ ID NO:562); ITYRFYLI (SEQ ID NO:563); ILDDNLYKV (SEQ ID NO:564); KVDDTFYYV (SEQ ID NO:565); AAFEFINSL (SEQ ID NO:566); KSYNYMLL (SEQ ID NO:567); MPAYIRNTL (SEQ ID NO:568); RVYEALYYV (SEQ ID NO:569); IGMFNLTFI (SEQ ID NO:570); SLSAYIIRV (SEQ ID NO:571); LMYDIINSV (SEQ ID NO:572); RLYDYFTRV (SEQ ID NO:573); YSLPNAGDVI (SEQ ID NO:574); YSQVNKRYI (SEQ ID NO:575); VSLDYINTM (SEQ ID NO:576); TLPEVISTI (SEQ ID NO:577); FLTSVINRV (SEQ ID NO:578); GFFDFVNFV (SEQ ID NO:579); VLYDEFVTI (SEQ ID NO:580); FPYEGGKVF (SEQ ID NO:581); LMDENTYAM (SEQ ID NO:582); NLFDIPLLTV (SEQ ID NO:583); VGPSNSPTF (SEQ ID NO:584); YAPVSPIVI (SEQ ID NO:585) and HVDGKILFV (SEQ ID NO:586).

[0156] Parapoxvirus (orf virus). Antigens include uncharacterized protein; ORF011 putative EEV envelope phospholipase; ORF052 putative IMV membrane protein; ORF110 EEV glycoprotein; ORF094 putative phosphorylated IMV membrane protein; ORF056RNA polymerase subunit RP0147; ORF101 RNA polymerase subunit RP0132 having epitope sequences AAFEFRDL (SEQ ID NO:587); AIIKYTDL (SEQ ID NO:588); AIYAFRLT (SEQ ID NO:589); AIYGFGVTF (SEQ ID NO:590); ANVDFMEYV (SEQ ID NO:591); and EQFSFSNV (SEQ ID NO:592). Other antigens and their associated antibodies and antibody fragments which bind to epitopes include Avipoxvirus; Capripoxvirus; Leporiipoxvirus; Suipoxvirus; Molluscipoxvirus; Entomopoxvirinae; Papovaviridae; Polyomavirus; Papillomavirus; Paramyxoviridae; Paramyxovirus; Parainfluenza virus 1; Morbillivirus; Measles virus; Rubulavirus; Mumps virus; Pneumonovirinae; Pneumovirus; Metapneumovirus; Avian pneumovirus; Human metapneumovirus; Picornaviridae, and Enterovirus (enterovirus A, coxsackievirus A). Antigen includes genome polyprotein having epitopes selected from TYTFGEHKQEKDLEY (SEQ ID NO:593); TEDSHPPYKQTQPGA (SEQ ID NO:594); PESRESLAWQTATNP (SEQ ID NO:595); FGEHKQEKDL (SEQ ID NO:596); AGGTGTEDSHPPYKQ (SEQ ID NO:597); FGEHKQEKDL (SEQ ID NO:598); AGGTGTEDSHPPYKQ (SEQ ID NO:599); FGEHKQEKDLEYGAC (SEQ ID NO:600); HYRAHARDGVFDYYT (SEQ ID NO:601); KQEDK (SEQ ID NO:602); GDPIADMIDQTVNNQ (SEQ ID NO:603); YPTFGEHLQANDLDY (SEQ ID NO:604); LEGTTNPNT (SEQ ID NO:605); VSSHRLDDTGEVPALQ (SEQ ID NO:606); RIYMRMKHVR (SEQ ID NO:607); TSKSKYPLVV (SEQ ID NO:608); and DGYPTFGEHKQEKDL (SEQ ID NO:609) etc.

[0157] Rhinovirus and Hepatovirus. Human hepatitis A virus (hepatovirus A) with genome polyproteins as an antigen with epitopes YMYAVSGAL (SEQ ID NO:610); FWRGDLVFDFQV (SEQ ID NO:611); MNMSKQGIFQTVGSGLDHILSLA (SEQ ID NO:612); TVSTEQNVPDPQVGI (SEQ ID NO:613); ASICQMFCFWRGDLVFDFQV (SEQ ID NO:614); DHMSIYKFMGRSHFLCTFTF (SEQ ID NO:615); FPELKPGESTHTSDHMSIYK (SEQ ID NO:616) and as additionally disclosed in the IED. Others are inclusive of Cardiovirus; Andapthovirus, Reoviridae, Orthoreovirus; Orbivirus; Rotavirus; Cypovirus; Fijivirus, phytoreovirus; oryzavirus; retroviridae; mammalian type B retrovirus; mammalian type C retroviruses; avian type C retroviruses; type D retrovirus group; BLV-HTLV retroviruses; Lentivirus; Human immunodeficiency virus 1; Human immunodeficiency virus 2; HTLV-I and II viruses; Herpes simplex virus; Epstein Barr virus; Cytomegalovirus; Hepatitis virus (HCV, HAV, HBV, HDV, HEV); Toxoplasma gondii virus, Treponema pallidium virus; Human T-lymphotrophic virus; Encephalitis virus; West Nile virus; Dengue virus; Varicella Zoster virus; Rubeola, mumps, rubella, spumavirus, flaviviridae, hepatitis C virus; hepadnaviridae, hepatitis B virus; togaviridae, alphavirus sindbis virus; rubivirus; rubella virus, rhabdovridae, vesiculovirus; lyssavirus, ephemerovirus, cytohabdovirus, necleorhabdovirus, arenaviridae, arenavirus, lymphocytic choriomenigitis virus; Ippy virus; Lassa virus; and Torovirus.

[0158] Thus, the recited multispecific and multivalent antibody constructs have embedded sequences that target and bind to epitopes on viral peptides, proteins, polypeptides or glycosylated versions thereof in a subject in need of treatment thereof, wherein said viral peptides, proteins, polypeptides or glycosylated versions thereof are selected from the group consisting of influenza virus neuraminidase, influenza virus hemagglutinin, human respiratory syncytial virus (RSV)-viral proteins, RSV F glycoprotein, RSV G glycoprotein, herpes simplex virus (HSV) viral proteins, herpes simplex virus glycoproteins gB, gC, gD and gE, chlamydia MOMP and PorB antigens, core protein, matrix protein or other protein of Dengue virus, measles virus hemagglutinin, herpes simplex virus type 2 glycoprotein gB, poliovirus 1 VP1, envelope glycoproteins of HIV 1, hepatitis B surface antigen, diphtheria toxin, streptococcus 24 M epitope, gonococcal pilin, pseudorabies virus g50 (gpD), pseudorabies virus II (gpB), pseudorabies virus III (gpC), pseudorabides virus glycoprotein H, pseudorabies virus glycoprotein E, transmissible gastroenteritis glycoprotein 195, transmissible gastroenteritis matrix protein, swine rotavirus glycoprotein 38, swine parvovirus capside protein, serpulinahydodysenteriae protective antigen, govine viral diarrhea glycoprotein 55, Newcastle disease virus hemagglutinin-neuroaminidase, swine flu hemagglutinin, swine flue neuraminidase, foot and mouth disease virus, hog colera virus, swine influenza virus, African swine fever virus, Mycoplasma liyopneutiinniae, infections bovine rhinotracheitis virus, infection bovine rhinotracheitis virus glycoprotein e, glycoprotein G, infectiouls laryngotracheitis virus, infectious laryngotracheitis virus glycoprotein G or glycoprotein I, a glycoprotein of Las Cross virus, neonatal calf diarrhea virus, Venezuelan equine encephalomyelitis virus, punta toro virus, murine leukemia virus, mouse mammary tumor virus, hepatitis B virus core protein and hepatitis B virus surface antigen or a fragment or derivative thereof, antigen of equine influenza virus or equine herpes virus, including equine influenza virus type A/Alaska 91 neuraminidase, equine influenza virus typeA/Miami 63 neuraminidase, equine influenza virus type A/Kentucky 81 neuraminidase equine herpes virus type 1 glycoprotein B, and equine herpes virus type 1 glycoprotein D, antigen of bovine respiratory syncytial virus or bovine parainfluenza virus, bovine respiratory syncytial virus attachment protein (BRSV G), bovine respiratory syncytial virus fusion protein (BRSV F), bovine respiratory syncytial virus nucleocapside protein (BRSVN), bovine parainfluenza virus type 3 fusion protein, bovine parainfluenza virus type 3 hemagglutinin neuraminidase, bovine viral diarrhea virus glycoprotein 48 and glycoprotein 53, glycoprotein E of Dengue virus, and glycoprotein E1E2 of human hepatitis C virus. For example, said viral peptides, proteins, polypeptides or glycosylated versions thereof are selected from the group consisting of: influenza virus neuraminidase, influenza virus hemagglutinin, herpes simplex virus (HSV) viral proteins, core protein, matrix protein or other protein of Dengue virus, and swine influenza viral proteins.

[0159] All the antigen binding polypeptide structures described herein and all the antigen binding polypeptide complex structures described herein can specifically bind to one or more of the viral antigen targets described herein, namely one or more of (such as two or more, three or more or four of): influenza virus neuraminidase, influenza virus hemagglutinin, herpes simplex virus (HSV) viral proteins, core protein, matrix protein or other protein of Dengue virus, and swine influenza viral proteins.

[0160] In some aspects, the antigen binding polypeptide and the antigen binding polypeptide complex can specifically bind to influenza virus neuraminidase. In some aspects, the antigen binding polypeptide or the antigen binding polypeptide complex comprises a VL1 that specifically binds to influenza virus neuraminidase. In some aspects, the antigen binding polypeptide or the antigen binding polypeptide complex comprises a VL2 that specifically binds to influenza virus neuramnmidase. In some aspects, the antigen binding polypeptide or the antigen binding polypeptide complex comprises a VH1 that specifically binds to influenza virus neuraminidase. In some aspects, the antigen binding polypeptide or the antigen binding polypeptide complex comprises a VH2 that specifically binds to influenza virus neuraminidase. In some aspects, the antigen binding polypeptide and the antigen binding polypeptide complex can specifically bind to influenza virus hemagglutinin. In some aspects, the antigen binding polypeptide or the antigen binding polypeptide complex comprises a VL1 that specifically binds to influenza virus hemagglutinin. In some aspects, the antigen binding polypeptide or the antigen binding polypeptide complex comprises a VL2 that specifically binds to influenza virus hemagglutinin. In some aspects, the antigen binding polypeptide or the antigen binding polypeptide complex comprises a VH1 that specifically binds to influenza virus hemagglutinin. In some aspects, the antigen binding polypeptide or the antigen binding polypeptide complex comprises a VH2 that specifically binds to influenza virus hemagglutinin. In some aspects, the antigen binding polypeptide and the antigen binding polypeptide complex can specifically bind to herpes simplex virus (HSV) viral proteins. In some aspects, the antigen binding polypeptide or the antigen binding polypeptide complex comprises a VL1 that specifically binds to herpes simplex virus (HSV) viral proteins. In some aspects, the antigen binding polypeptide or the antigen binding polypeptide complex comprises a VL2 that specifically binds to herpes simplex virus (HSV) viral proteins. In some aspects, the antigen binding polypeptide or the antigen binding polypeptide complex comprises a VH1 that specifically binds to herpes simplex virus (HSV) viral proteins. In some aspects, the antigen binding polypeptide or the antigen binding polypeptide complex comprises a VH2 that specifically binds to herpes simplex virus (HSV) viral proteins. In some aspects, the antigen binding polypeptide and the antigen binding polypeptide complex can specifically bind to gue virus. In some aspects, the antigen binding polypeptide or the antigen binding polypeptide complex comprises a VL1 that specifically binds to Dengue virus. In some aspects, the antigen binding polypeptide or the antigen binding polypeptide complex comprises a VL2 that specifically binds to Dengue virus. In some aspects, the antigen binding polypeptide or the antigen binding polypeptide complex comprises a VH1 that specifically binds to Dengue virus. In some aspects, the antigen binding polypeptide or the antigen binding polypeptide complex comprises a VH2 that specifically binds to Dengue virus. In some aspects, the antigen binding polypeptide and the antigen binding polypeptide complex can specifically bind to swine influenza virus. In some aspects, the antigen binding polypeptide described herein or the antigen binding polypeptide complex described herein comprises a VL1 that specifically binds to swine influenza virus. In some aspects, the antigen binding polypeptide described herein or the antigen binding polypeptide complex described herein comprises a VL2 that specifically binds to swine influenza virus. In some aspects, the antigen binding polypeptide described herein or the antigen binding polypeptide complex described herein comprises a VH1 that specifically binds to swine influenza virus. In some aspects, the antigen binding polypeptide described herein or the antigen binding polypeptide complex described herein comprises a VH2 that specifically binds to swine influenza virus.

[0161] In other aspects, the invention is directed to an antigen binding polypeptide or antigen binding polypeptide complex (e.g., antibody or antigen binding fragment thereof) that specifically binds to A2AR, APRIL, ATPDase, BAFF, BAFFR, BCMA, BlyS, BTK, BTLA, B7DC, B7H1, B7H2, B7H3, B7H4, B7H5, B7H6, B7H7, B7RP1, B7-4, C3, C5, CCL2, CCL3, CCL4, CCL5, CCL7, CCL8, CCLI1, CCL15, CCL17, CCL19, CCL20, CCL21, CCL25 CCR3, CCR4, CD3, CD16A, CD19, CD20, CD24, CD27, CD28, CD30, CD38, CD39, CD40, CD40L, CD47, CD52, CD70, CD80, CD86, CD123, CD133, CD137, CD137L, CD160, CD272, CEACAM5, CLEC9, CLEC91, CRTH2, CSF-1, CSF-2, CSF-3, CXCL1, CXCL2, CXCL4, CXCL12, CXCL13, CXCR3, cMet, CTLA4, DLL3, DLL4, DNGR-1, E-cadherin, EGFR, ENTPD1, EpCAM, FCER1, FCER1A, FCER2, FGFR, FLAP, FOLH1, Gi24, GITR, GITRL, GPR5, GP100, GPRC5D, HER2, HER3, ICOSL, ICOS, HHLA2, HMGB1, HVEM, IDO, IFNa, IgE, IGFR, IL2Rbeta, IL1, IL1A, IL1B, ILF10, IL2, IL4, IL4Ra, IL5, IL5R, IL6, IL7, IL7Ra, IL8, IL9, IL9R, IL10, rhIL10, IL12, IL13, IL13Ra1, IL13Ra2, IL15, IL17, IL17Rb, IL18, IL22, IL23, IL25, IL7, IL33, IL35, ITGB4, ITK, KIR, LAG3, LAMP1, leptin, LPFS2, MHC class II, MUC-1, MUC-16, NCR3LG1, NKG2D, NKp46, NTPDase-1, OX40, OX40L, PD-1, PD-L1, PD-L2, PROM1, S152, SIRPalpha, SISP1, SLC, SPG64, ST2, STEAP1, STEAP2, Syk kinase, STEAP1, TROP2, TACI, TDO, T14, TGFbeta, TIGIT, TIM3, TLR, TLR2, TLR4, TLRS, TLR9, TMEF1, TNFa, TNFRSF7, Tp55, TREM1, TSLP, TSLPR, TWEAK, VEGF, VISTA, Vstm3, or WUCAM, or a combination thereof. In some aspects, the antigen binding polypeptide or antigen binding polypeptide complex specifically binds at least one epitope on at least one antigen selected from the group consisting of A2AR, APRIL, ATPDase, BAFF, BAFFR, BCMA, BlyS, BTK, BTLA, B7DC, B7H1, B7H2, B7H3, B7H4, B7H5, B7H6, B7H7, B7RP1, B7-4, C3, C5, CCL2, CCL3, CCL4, CCL5, CCL7, CCL8, CCL11, CCL15, CCL17, CCL19, CCL20, CCL21, CCL25 CCR3, CCR4, CD3, CD19, CD20, CD24, CD27, CD28, CD38, CD39, CD40, CD40L, CD47, CD52, CD70, CD80, CD86, CD123, CD133, CD137, CD137L, CD160, CD272, CEACAM5, CLEC9, CLEC91, CRTH2, CSF-1, CSF-2, CSF-3, CXCL1, CXCL2, CXCL4, CXCL12, CXCL13, CXCR3, cMet, CTLA4, DLL3, DNGR-1, E-cadherin, EGFR, ENTPD1, EpCAM, FCER1, FCER1A, FCER2, FGFR, FLAP, FOLH1, Gi24, GITR, GITRL, GPR5, HER2, HER3, ICOSL, ICOS, HHLA2, HMGB1, HVEM, IDO, IFNa, IgE, IGF1R, IL2Rbeta, IL1, IL1A, IL1B, IL1F10, IL2, IL4, IL4Ra, IL5, IL5R, IL6, IL7, IL7Ra, IL8, IL9, IL9R, L10, rhIL10, IL12, IL13, IL13Ra1, IL13Ra2, IL15, IL17, IL17Rb, IL18, IL22, IL23, IL25, IL7, IL33, IL35, ITGB4, ITK, KIR, LAG3, LAMP1, leptin, LPFS2, MHC class II, MUC-1, MUC-16, NCR3LG1, NKG2D, NKp46, NTPDase-1, OX40, OX40L, PD-1, PD-L1, PD-L2, PROM1, S1S2, SIRPalpha, SISP1, SLC, SPG64, ST2, STEAP1, STEAP2, Syk kinase, STEAP1, TROP2, TACI, TDO, T14, TIGIT, TIM3, TLR, TLR2, TLR4, TLR5, TLR9, TMEF1, TNFa, TNFRSF7, Tp55, TREM1, TSLP, TSLPR, TWEAK, VEGF, VISTA, Vstm3, WUCAM, DLL4, TGFbeta, GP100, GPRC5D, CD30 or CD16A. In some aspects, the antigen binding polypeptide or polypeptide comprised within the antigen binding complex may comprise a VL1, VL2, VL3, VL4, VL5, VL6, VH1, VH2, VH3, VH4, VH5 and/or VH6 that specifically binds to A2AR, APRIL, ATPDase, BAFF, BAFFR, BCMA, BlyS, BTK, BTLA, B7DC, B7H1, B7H2, B7H3, B7H4, B7H5, B7H6, B7H7, B7RP1, B7-4, C3, C5, CCL2, CCL3, CCL4, CCL5, CCL7, CCL8, CCL11, CCL15, CCL17, CCL19, CCL20, CCL21, CCL25 CCR3, CCR4, CD3, CD19, CD20, CD24, CD27, CD28, CD38, CD39, CD40, CD40L, CD47, CD52, CD70, CD80, CD86, CD123, CD133, CD137, CD137L, CD160, CD272, CEACAM5, CLEC9, CLEC91, CRTH2, CSF-1, CSF-2, CSF-3, CXCL1, CXCL2, CXCL4, CXCL12, CXCL13, CXCR3, cMet, CTLA4, DLL3, DNGR-1, E-cadherin, EGFR, ENTPD1, EpCAM, FCER1, FCER1A, FCER2, FGFR, FLAP, FOLH1, Gi24, GITR, GITRL, GPR5, HER2, HER3, ICOSL, ICOS, HHLA2, HMGB1, HVEM, IDO, IFNa, IgE, IGF1R, IL2Rbeta, IL1, IL1A, IL1B, IL1F10, IL2, IL4, IL4Ra, IL5, IL5R, IL6, IL7, IL7Ra, IL8, I9, IL9R, IL10, rhIL10, IL12, IL13, I13Ra1, IL13Ra2, IL15, IL17, IL17Rb, IL18, IL22, IL23, IL25, IL7, IL33, IL35, ITGB4, ITK, KIR, LAG3, LAMP1, leptin, LPFS2, MHC class II, MUC-1, MUC-16, NCR3LG1, NKG2D, NKp46, NTPDase-1, OX40, OX40L, PD-1, PD-L1, PD-L2, PROM1, S152, SIRPalpha, SISP1, SLC, SPG64, ST2, STEAP1, STEAP2, Syk kinase, STEAP1, TROP2, TACI, TDO, T14, TIGIT, TIM3, TLR, TLR2, TLR4, TLR5, TLR9, TMEF1, TNFa, TNFRSF7, Tp55, TREM1, TSLP, TSLPR, TWEAK, VEGF, VISTA, Vstm3, WUCAM, DLL4, TGFbeta, GP100, GPRC5D, CD30 or CD16A. For example, the antigen binding polypeptide or polypeptide comprised within the antigen binding complex may comprise a VL1 that specifically binds to A2AR, APRIL, ATPDase, BAFF, BAFFR, BCMA, BlyS, BTK, BTLA, B7DC, B7H1, B7H2, B7H3, B7H4, B7H5, B7H6, B7H7, B7RP1, B7-4, C3, C5, CCL2, CCL3, CCL4, CCL5, CCL7, CCL8, CCL11, CCL15, CCL17, CCL19, CCL20, CCL21, CCL25 CCR3, CCR4, CD3, CD19, CD20, CD24, CD27, CD28, CD38, CD39, CD40, CD40L, CD47, CD52, CD70, CD80, CD86, CD123, CD133, CD137, CD137L, CD160, CD272, CEACAM5, CLEC9, CLEC91, CRTH2, CSF-1, CSF-2, CSF-3, CXCL1, CXCL2, CXCL4, CXCL12, CXCL13, CXCR3, cMet, CTLA4, DLL3, DNGR-1, E-cadherin, EGFR, ENTPD1, EpCAM, FCER1, FCER1A, FCER2, FGFR, FLAP, FOLH1, Gi24, GITR, GITRL, GPR5, HER2, HER3, ICOSL, ICOS, HHLA2, HMGB1, HVEM, IDO, IFNa, IgE, IGF1R, IL2Rbeta, IL1, IL1A, IL1B, ILF10, IL2, IL4, IL4Ra, IL5, IL5R, IL6, IL7, IL7Ra, IL8, IL9, IL9R, IL10, rhIL10, IL12, IL13, IL13Ra1, IL13Ra2, IL15, IL17, IL17Rb, IL18, IL22, IL23, IL25, IL7, IL33, IL35, ITGB4, ITK, KIR, LAG3, LAMP1, leptin, LPFS2, MHC class II, MUC-1, MUC-16, NCR3LG1, NKG2D, NKp46, NTPDase-1, OX40, OX40L, PD-1, PD-L1, PD-L2, PROM1, S152, SIRPalpha, SISP1, SLC, SPG64, ST2, STEAP1, STEAP2, Syk kinase, STEAP1, TROP2, TACI, TDO, T14, TIGIT, TIM3, TLR, TLR2, TLR4, TLR5, TLR9, TMEF1, TNFa, TNFRSF7, Tp55, TREM1, TSLP, TSLPR, TWEAK, VEGF, VISTA, Vstm3, WUCAM, DLL4, TGFbeta, GP100, GPRC5D, CD30 or CD16A. For example, the antigen binding polypeptide or polypeptide comprised within the antigen binding complex may comprise a VL2 that specifically binds to A2AR, APRIL, ATPDase, BAFF, BAFFR, BCMA, BlyS, BTK, BTLA, B7DC, B7H1, B7H2, B7H3, B7H4, B7H5, B7H6, B7H7, B7RP1, B7-4, C3, C5, CCL2, CCL3, CCL4, CCL5, CCL7, CCL8, CCL11, CCL15, CCL17, CCL19, CCL20, CCL21, CCL25 CCR3, CCR4, CD3, CD19, CD20, CD24, CD27, CD28, CD38, CD39, CD40, CD40L, CD47, CD52, CD70, CD80, CD86, CD123, CD133, CD137, CD137L, CD160, CD272, CEACAM5, CLEC9, CLEC91, CRTH2, CSF-1, CSF-2, CSF-3, CXCL1, CXCL2, CXCL4, CXCL12, CXCL13, CXCR3, cMet, CTLA4, DLL3, DNGR-1, E-cadherin, EGFR, ENTPD1, EpCAM, FCER1, FCER1A, FCER2, FGFR, FLAP, FOLH1, Gi24, GITR, GITRL, GPR5, HER2, HER3, ICOSL, ICOS, HHLA2, HMGB1, HVEM, IDO, IFNa, IgE, IGF1R, IL2Rbeta, IL1, IL1A, IL1B, ILF10, IL2, IL4, IL4Ra, IL5, IL5R, IL6, IL7, IL7Ra, IL8, IL9, IL9R, IL10, rhIL10, 1L12, IL13, IL13Ra1, IL13Ra2, IL15, IL17, IL17Rb, IL18, IL22, IL23, IL25, IL7, IL33, IL35, ITGB4, ITK, KIR, LAG3, LAMP1, leptin, LPFS2, MHC class II, MUC-1, MUC-16, NCR3LG1, NKG2D, NKp46, NTPDase-1, OX40, OX40L, PD-1, PD-L1, PD-L2, PROM1, S152, SIRPalpha, SISP1, SLC, SPG64, ST2, STEAP1, STEAP2, Syk kinase, STEAP1, TROP2, TACI, TDO, T14, TIGIT, TIM3, TLR, TLR2, TLR4, TLR5, TLR9, TMEF1, TNFa, TNFRSF7, Tp55, TREM1, TSLP, TSLPR, TWEAK, VEGF, VISTA, Vstm3, WUCAM, DLL4, TGFbeta, GP100, GPRC5D, CD30 or CD16A. For example, the antigen binding polypeptide or polypeptide comprised within the antigen binding complex may comprise a VL3 that specifically binds to A2AR, APRIL, ATPDase, BAFF, BAFFR, BCMA, BlyS, BTK, BTLA, B7DC, B7H1, B7H2, B7H3, B7H4, B7H5, B7H6, B7H7, B7RP1, B7-4, C3, C5, CCL2, CCL3, CCL4, CCL5, CCL7, CCL8, CCL11, CCL15, CCL17, CCL19, CCL20, CCL21, CCL25 CCR3, CCR4, CD3, CD19, CD20, CD24, CD27, CD28, CD38, CD39, CD40, CD40L, CD47, CD52, CD70, CD80, CD86, CD123, CD133, CD137, CD137L, CD160, CD272, CEACAM5, CLEC9, CLEC91, CRTH2, CSF-1, CSF-2, CSF-3, CXCL1, CXCL2, CXCL4, CXCL12, CXCL13, CXCR3, cMet, CTLA4, DLL3, DNGR-1, E-cadherin, EGFR, ENTPD1, EpCAM, FCER1, FCER1A, FCER2, FGFR, FLAP, FOLH1, Gi24, GITR, GITRL, GPR5, HER2, HER3, ICOSL, ICOS, HHLA2, HMGB1, HVEM, IDO, IFNa, IgE, IGF1R, IL2Rbeta, IL1, IL1A, IL1B, ILF10, IL2, IL4, IL4Ra, IL5, IL5R, IL6, IL7, IL7Ra, IL8, IL9, IL9R, IL10, rhIL10, IL12, IL13, IL13Ra1, IL13Ra2, IL15, IL17, IL17Rb, IL18, IL22, IL23, IL25, IL7, IL33, IL35, ITGB4, ITK, KIR, LAG3, LAMP1, leptin, LPFS2, MHC class II, MUC-1, MUC-16, NCR3LG1, NKG2D, NKp46, NTPDase-1, OX40, OX40L, PD-1, PD-L1, PD-L2, PROM1, S152, SIRPalpha, SISP1, SLC, SPG64, ST2, STEAP1, STEAP2, Syk kinase, STEAP1, TROP2, TACI, TDO, T14, TIGIT, TIM3, TLR, TLR2, TLR4, TLRS, TLR9, TMEF1, TNFa, TNFRSF7, Tp55, TREM1, TSLP, TSLPR, TWEAK, VEGF, VISTA, Vstm3, WUCAM, DLL4, TGFbeta, GP100, GPRC5D, CD30 or CD16A. For example, the antigen binding polypeptide or polypeptide comprised within the antigen binding complex may comprise a VL4 that specifically binds to A2AR, APRIL, ATPDase, BAFF, BAFFR, BCMA, BlyS, BTK, BTLA, B7DC, B7H1, B7H2, B7H3, B7H4, B7H5, B7H6, B7H7, B7RP1, B7-4, C3, C5, CCL2, CCL3, CCL4, CCL5, CCL7, CCL8, CCL11, CCL15, CCL17, CCL19, CCL20, CCL21, CCL25 CCR3, CCR4, CD3, CD19, CD20, CD24, CD27, CD28, CD38, CD39, CD40, CD40L, CD47, CD52, CD70, CD80, CD86, CD123, CD133, CD137, CD137L, CD160, CD272, CEACAM5, CLEC9, CLEC91, CRTH2, CSF-1, CSF-2, CSF-3, CXCL1, CXCL2, CXCL4, CXCL12, CXCL13, CXCR3, cMet, CTLA4, DLL3, DNGR-1, E-cadherin, EGFR, ENTPD1, EpCAM, FCER1, FCER1A, FCER2, FGFR, FLAP, FOLH1, Gi24, GITR, GITRL, GPR5, HER2, HER3, ICOSL, ICOS, HHLA2, HMGB1, HVEM, IDO, IFNa, IgE, IGF1R, IL2Rbeta, IL1, IL1A, IL1B, ILF10, IL2, IL4, IL4Ra, IL5, IL5R, IL6, IL7, IL7Ra, IL8, IL9, IL9R, IL10, rhIL10, IL12, IL13, IL13Ra1, IL13Ra2, IL15, IL17, IL17Rb, IL18, IL22, IL23, IL25, IL7, IL33, IL35, ITGB4, ITK, KIR, LAG3, LAMP1, leptin, LPFS2, MHC class II, MUC-1, MUC-16, NCR3LG1, NKG2D, NKp46, NTPDase-1, OX40, OX40L, PD-1, PD-L1, PD-L2, PROM1, S152, SIRPalpha, SISP1, SLC, SPG64, ST2, STEAP1, STEAP2, Syk kinase, STEAP1, TROP2, TACI, TDO, T14, TIGIT, TIM3, TLR, TLR2, TLR4, TLRS, TLR9, TMEF1, TNFa, TNFRSF7, Tp55, TREM1, TSLP, TSLPR, TWEAK, VEGF, VISTA, Vstm3, WUCAM, DLL4, TGFbeta, GP100, GPRC5D, CD30 or CD16A. For example, the antigen binding polypeptide or polypeptide comprised within the antigen binding complex may comprise a VL5 that specifically binds to A2AR, APRIL, ATPDase, BAFF, BAFFR, BCMA, BlyS, BTK, BTLA, B7DC, B7H1, B7H2, B7H3, B7H4, B7H5, B7H6, B7H7, B7RP1, B7-4, C3, C5, CCL2, CCL3, CCL4, CCL5, CCL7, CCL8, CCL11, CCL15, CCL17, CCL19, CCL20, CCL21, CCL25 CCR3, CCR4, CD3, CD19, CD20, CD24, CD27, CD28, CD38, CD39, CD40, CD40L, CD47, CD52, CD70, CD80, CD86, CD123, CD133, CD137, CD137L, CD160, CD272, CEACAM5, CLEC9, CLEC91, CRTH2, CSF-1, CSF-2, CSF-3, CXCL1, CXCL2, CXCL4, CXCL12, CXCL13, CXCR3, cMet, CTLA4, DLL3, DNGR-1, E-cadherin, EGFR, ENTPD1, EpCAM, FCER1, FCER1A, FCER2, FGFR, FLAP, FOLH1, Gi24, GITR, GITRL, GPR5, HER2, HER3, ICOSL, ICOS, HHLA2, HMGB1, HVEM, IDO, IFNa, IgE, IGF1R, IL2Rbeta, IL1, IL1A, IL1B, ILF10, IL2, IL4, IL4Ra, IL5, IL5R, IL6, IL7, IL7Ra, IL8, IL9, IL9R, IL10, rhIL10, 1L12, IL13, IL13Ra1, IL13Ra2, IL15, IL17, IL17Rb, IL18, IL22, IL23, IL25, IL7, IL33, IL35, ITGB4, ITK, KIR, LAG3, LAMP1, leptin, LPFS2, MHC class II, MUC-1, MUC-16, NCR3LG1, NKG2D, NKp46, NTPDase-1, OX40, OX40L, PD-1, PD-L1, PD-L2, PROM1, S152, SIRPalpha, SISP1, SLC, SPG64, ST2, STEAP1, STEAP2, Syk kinase, STEAP1, TROP2, TACI, TDO, T14, TIGIT, TIM3, TLR, TLR2, TLR4, TLR5, TLR9, TMEF1, TNFa, TNFRSF7, Tp55, TREM1, TSLP, TSLPR, TWEAK, VEGF, VISTA, Vstm3, WUCAM, DLL4, TGFbeta, GP100, GPRC5D, CD30 or CD16A. For example, the antigen binding polypeptide or polypeptide comprised within the antigen binding complex may comprise a VL6 that specifically binds to A2AR, APRIL, ATPDase, BAFF, BAFFR, BCMA, BlyS, BTK, BTLA, B7DC, B7H1, B7H2, B7H3, B7H4, B7H5, B7H6, B7H7, B7RP1, B7-4, C3, C5, CCL2, CCL3, CCL4, CCL5, CCL7, CCL8, CCL11, CCL15, CCL17, CCL19, CCL20, CCL21, CCL25 CCR3, CCR4, CD3, CD19, CD20, CD24, CD27, CD28, CD38, CD39, CD40, CD40L, CD47, CD52, CD70, CD80, CD86, CD123, CD133, CD137, CD137L, CD160, CD272, CEACAM5, CLEC9, CLEC91, CRTH2, CSF-1, CSF-2, CSF-3, CXCL1, CXCL2, CXCL4, CXCL12, CXCL13, CXCR3, cMet, CTLA4, DLL3, DNGR-1, E-cadherin, EGFR, ENTPD1, EpCAM, FCER1, FCER1A, FCER2, FGFR, FLAP, FOLH1, Gi24, GITR, GITRL, GPR5, HER2, HER3, ICOSL, ICOS, HHLA2, HMGB1, HVEM, IDO, IFNa, IgE, IGF1R, IL2Rbeta, IL1, IL1A, IL1B, ILF10, IL2, IL4, IL4Ra, IL5, IL5R, IL6, IL7, IL7Ra, IL8, IL9, IL9R, IL10, rhIL10, 1L12, IL13, IL13Ra1, IL13Ra2, IL15, IL17, IL17Rb, IL18, IL22, IL23, IL25, IL7, IL33, IL35, ITGB4, ITK, KIR, LAG3, LAMP1, leptin, LPFS2, MHC class II, MUC-1, MUC-16, NCR3LG1, NKG2D, NKp46, NTPDase-1, OX40, OX40L, PD-1, PD-L1, PD-L2, PROM1, S152, SIRPalpha, SISP1, SLC, SPG64, ST2, STEAP1, STEAP2, Syk kinase, STEAP1, TROP2, TACI, TDO, T14, TIGIT, TIM3, TLR, TLR2, TLR4, TLRS, TLR9, TMEF1, TNFa, TNFRSF7, Tp55, TREM1, TSLP, TSLPR, TWEAK, VEGF, VISTA, Vstm3, WUCAM, DLL4, TGFbeta, GP100, GPRC5D, CD30 or CD16A. For example, the antigen binding polypeptide or polypeptide comprised within the antigen binding complex may comprise a VH1 that specifically binds to A2AR, APRIL, ATPDase, BAFF, BAFFR, BCMA, BlyS, BTK, BTLA, B7DC, B7H1, B7B2, B7B3, B7B4, B7B5, B7B6, B7H7, B7RP1, B7-4, C3, C5, CCL2, CCL3, CCL4, CCL5, CCL7, CCL8, CCL11, CCL15, CCL17, CCL19, CCL20, CCL21, CCL25 CCR3, CCR4, CD3, CD19, CD20, CD24, CD27, CD28, CD38, CD39, CD40, CD40L, CD47, CD52, CD70, CD80, CD86, CD123, CD133, CD137, CD137L, CD160, CD272, CEACAM5, CLEC9, CLEC91, CRTH2, CSF-1, CSF-2, CSF-3, CXCL1, CXCL2, CXCL4, CXCL12, CXCL13, CXCR3, cMet, CTLA4, DLL3, DNGR-1, E-cadherin, EGFR, ENTPD1, EpCAM, FCER1, FCER1A, FCER2, FGFR, FLAP, FOLH1, Gi24, GITR, GITRL, GPR5, HER2, HER3, ICOSL, ICOS, HHLA2, HMGB1, HVEM, IDO, IFNa, IgE, IGF1R, IL2Rbeta, IL1, IL1A, IL1B, IL1F10, IL2, IL4, IL4Ra, IL5, IL5R, IL6, IL7, IL7Ra, IL8, IL9, IL9R, IL10, rhIL10, 1L12, IL13, IL13Ra1, IL13Ra2, IL15, IL17, IL17Rb, IL18, IL22, IL23, IL25, IL7, IL33, IL35, ITGB4, ITK, KIR, LAG3, LAMP1, leptin, LPFS2, MHC class II, MUC-1, MUC-16, NCR3LG1, NKG2D, NKp46, NTPDase-1, OX40, OX40L, PD-1, PD-L1, PD-L2, PROM1, S152, SIRPalpha, SISP1, SLC, SPG64, ST2, STEAP1, STEAP2, Syk kinase, STEAP1, TROP2, TACI, TDO, T14, TIGIT, TIM3, TLR, TLR2, TLR4, TLR5, TLR9, TMEF1, TNFa, TNFRSF7, Tp55, TREM1, TSLP, TSLPR, TWEAK, VEGF, VISTA, Vstm3, WUCAM, DLL4, TGFbeta, GP100, GPRC5D, CD30 or CD16A. For example, the antigen binding polypeptide or polypeptide comprised within the antigen binding complex may comprise a VH2 that specifically binds to A2AR, APRIL, ATPDase, BAFF, BAFFR, BCMA, BlyS, BTK, BTLA, B7DC, B7H1, B7H2, B7H3, B7H4, B7H5, B7H6, B7H7, B7RP1, B7-4, C3, C5, CCL2, CCL3, CCL4, CCL5, CCL7, CCL8, CCL11, CCL15, CCL17, CCL19, CCL20, CCL21, CCL25 CCR3, CCR4, CD3, CD19, CD20, CD24, CD27, CD28, CD38, CD39, CD40, CD40L, CD47, CD52, CD70, CD80, CD86, CD123, CD133, CD137, CD137L, CD160, CD272, CEACAM5, CLEC9, CLEC91, CRTH2, CSF-1, CSF-2, CSF-3, CXCL1, CXCL2, CXCL4, CXCL12, CXCL13, CXCR3, cMet, CTLA4, DLL3, DNGR-1, E-cadherin, EGFR, ENTPD1, EpCAM, FCER1, FCER1A, FCER2, FGFR, FLAP, FOLH1, Gi24, GITR, GITRL, GPR5, HER2, HER3, ICOSL, ICOS, HHLA2, HMGB1, HVEM, IDO, IFNa, IgE, IGF1R, IL2Rbeta, IL1, IL1A, IL1B, IL1F10, IL2, IL4, IL4Ra, IL5, IL5R, IL6, IL7, IL7Ra, IL8, IL9, IL9R, IL10, rhIL10, 1L12, IL13, IL13Ra1, IL13Ra2, IL15, IL17, IL17Rb, IL18, IL22, IL23, IL25, IL7, IL33, IL35, ITGB4, ITK, KIR, LAG3, LAMP1, leptin, LPFS2, MHC class II, MUC-1, MUC-16, NCR3LG1, NKG2D, NKp46, NTPDase-1, OX40, OX40L, PD-1, PD-L1, PD-L2, PROM1, S152, SIRPalpha, SISP1, SLC, SPG64, ST2, STEAP1, STEAP2, Syk kinase, STEAP1, TROP2, TACI, TDO, T14, TIGIT, TIM3, TLR, TLR2, TLR4, TLRS, TLR9, TMEF1, TNFa, TNFRSF7, Tp55, TREM1, TSLP, TSLPR, TWEAK, VEGF, VISTA, Vstm3, WUCAM, DLL4, TGFbeta, GP100, GPRC5D, CD30 or CD16A. For example, the antigen binding polypeptide or polypeptide comprised within the antigen binding complex may comprise a VH3 that specifically binds to A2AR, APRIL, ATPDase, BAFF, BAFFR, BCMA, BlyS, BTK, BTLA, B7DC, B7H1, B7B2, B7B3, B7B4, B7B5, B7B6, B7H7, B7RP1, B7-4, C3, C5, CCL2, CCL3, CCL4, CCL5, CCL7, CCL8, CCL11, CCL15, CCL17, CCL19, CCL20, CCL21, CCL25 CCR3, CCR4, CD3, CD19, CD20, CD24, CD27, CD28, CD38, CD39, CD40, CD40L, CD47, CD52, CD70, CD80, CD86, CD123, CD133, CD137, CD137L, CD160, CD272, CEACAM5, CLEC9, CLEC91, CRTH2, CSF-1, CSF-2, CSF-3, CXCL1, CXCL2, CXCL4, CXCL12, CXCL13, CXCR3, cMet, CTLA4, DLL3, DNGR-1, E-cadherin, EGFR, ENTPD1, EpCAM, FCER1, FCER1A, FCER2, FGFR, FLAP, FOLH1, Gi24, GITR, GITRL, GPR5, HER2, HER3, ICOSL, ICOS, HHLA2, HMGB1, HVEM, IDO, IFNa, IgE, IGF1R, IL2Rbeta, IL1, IL1A, IL1B, IL1F10, IL2, IL4, IL4Ra, IL5, IL5R, IL6, IL7, IL7Ra, IL8, IL9, IL9R, IL10, rhIL10, 1L12, IL13, IL13Ra1, IL13Ra2, IL15, IL17, IL17Rb, IL18, IL22, IL23, IL25, IL7, IL33, IL35, ITGB4, ITK, KIR, LAG3, LAMP1, leptin, LPFS2, MHC class II, MUC-1, MUC-16, NCR3LG1, NKG2D, NKp46, NTPDase-1, OX40, OX40L, PD-1, PD-L1, PD-L2, PROM1, S152, SIRPalpha, SISP1, SLC, SPG64, ST2, STEAP1, STEAP2, Syk kinase, STEAP1, TROP2, TACI, TDO, T14, TIGIT, TIM3, TLR, TLR2, TLR4, TLRS, TLR9, TMEF1, TNFa, TNFRSF7, Tp55, TREM1, TSLP, TSLPR, TWEAK, VEGF, VISTA, Vstm3, WUCAM, DLL4, TGFbeta, GP100, GPRC5D, CD30 or CD16A. For example, the antigen binding polypeptide or polypeptide comprised within the antigen binding complex may comprise a VH4 that specifically binds to A2AR, APRIL, ATPDase, BAFF, BAFFR, BCMA, BlyS, BTK, BTLA, B7DC, B7H1, B7B2, B7B3, B7B4, B7B5, B7B6, B7H7, B7RP1, B7-4, C3, C5, CCL2, CCL3, CCL4, CCL5, CCL7, CCL8, CCL11, CCL15, CCL17, CCL19, CCL20, CCL21, CCL25 CCR3, CCR4, CD3, CD19, CD20, CD24, CD27, CD28, CD38, CD39, CD40, CD40L, CD47, CD52, CD70, CD80, CD86, CD123, CD133, CD137, CD137L, CD160, CD272, CEACAM5, CLEC9, CLEC91, CRTH2, CSF-1, CSF-2, CSF-3, CXCL1, CXCL2, CXCL4, CXCL12, CXCL13, CXCR3, cMet, CTLA4, DLL3, DNGR-1, E-cadherin, EGFR, ENTPD1, EpCAM, FCER1, FCER1A, FCER2, FGFR, FLAP, FOLH1, Gi24, GITR, GITRL, GPR5, HER2, HER3, ICOSL, ICOS, HHLA2, HMGB1, HVEM, IDO, IFNa, IgE, IGF1R, IL2Rbeta, IL1, IL1A, IL1B, ILF10, IL2, IL4, IL4Ra, IL5, IL5R, IL6, IL7, IL7Ra, IL8, IL9, IL9R, IL10, rhIL10, 1L12, IL13, IL13Ra1, IL13Ra2, IL15, IL17, IL17Rb, IL18, IL22, IL23, IL25, IL7, IL33, IL35, ITGB4, ITK, KIR, LAG3, LAMP1, leptin, LPFS2, MHC class II, MUC-1, MUC-16, NCR3LG1, NKG2D, NKp46, NTPDase-1, OX40, OX40L, PD-1, PD-L1, PD-L2, PROM1, S152, SIRPalpha, SISP1, SLC, SPG64, ST2, STEAP1, STEAP2, Syk kinase, STEAP1, TROP2, TACI, TDO, T14, TIGIT, TIM3, TLR, TLR2, TLR4, TLR5, TLR9, TMEF1, TNFa, TNFRSF7, Tp55, TREM1, TSLP, TSLPR, TWEAK, VEGF, VISTA, Vstm3, WUCAM, DLL4, TGFbeta, GP100, GPRC5D, CD30 or CD16A. For example, the antigen binding polypeptide or polypeptide comprised within the antigen binding complex may comprise a VH5 that specifically binds to A2AR, APRIL, ATPDase, BAFF, BAFFR, BCMA, BlyS, BTK, BTLA, B7DC, B7H1, B7H2, B7H3, B7H4, B7H5, B7H6, B7H7, B7RP1, B7-4, C3, C5, CCL2, CCL3, CCL4, CCL5, CCL7, CCL8, CCL11, CCL15, CCL17, CCL19, CCL20, CCL21, CCL25 CCR3, CCR4, CD3, CD19, CD20, CD24, CD27, CD28, CD38, CD39, CD40, CD40L, CD47, CD52, CD70, CD80, CD86, CD123, CD133, CD137, CD137L, CD160, CD272, CEACAM5, CLEC9, CLEC91, CRTH2, CSF-1, CSF-2, CSF-3, CXCL1, CXCL2, CXCL4, CXCL12, CXCL13, CXCR3, cMet, CTLA4, DLL3, DNGR-1, E-cadherin, EGFR, ENTPD1, EpCAM, FCER1, FCER1A, FCER2, FGFR, FLAP, FOLH1, Gi24, GITR, GITRL, GPR5, HER2, HER3, ICOSL, ICOS, HHLA2, HMGB1, HVEM, IDO, IFNa, IgE, IGF1R, IL2Rbeta, IL1, IL1A, IL1B, ILF10, IL2, IL4, IL4Ra, IL5, IL5R, IL6, IL7, IL7Ra, IL8, IL9, IL9R, IL10, rhIL10, 1L12, IL13, IL13Ra1, IL13Ra2, IL15, IL17, IL17Rb, IL18, IL22, IL23, IL25, IL7, IL33, IL35, ITGB4, ITK, KIR, LAG3, LAMP1, leptin, LPFS2, MHC class II, MUC-1, MUC-16, NCR3LG1, NKG2D, NKp46, NTPDase-1, OX40, OX40L, PD-1, PD-L1, PD-L2, PROM1, S152, SIRPalpha, SISP1, SLC, SPG64, ST2, STEAP1, STEAP2, Syk kinase, STEAP1, TROP2, TACI, TDO, T14, TIGIT, TIM3, TLR, TLR2, TLR4, TLR5, TLR9, TMEF1, TNFa, TNFRSF7, Tp55, TREM1, TSLP, TSLPR, TWEAK, VEGF, VISTA, Vstm3, WUCAM, DLL4, TGFbeta, GP100, GPRC5D, CD30 or CD16A. For example, the antigen binding polypeptide or polypeptide comprised within the antigen binding complex may comprise a VH6 that specifically binds to A2AR, APRIL, ATPDase, BAFF, BAFFR, BCMA, BlyS, BTK, BTLA, B7DC, B7H1, B7H2, B7H3, B7H4, B7H5, B7H6, B7H7, B7RP1, B7-4, C3, C5, CCL2, CCL3, CCL4, CCL5, CCL7, CCL8, CCL11, CCL15, CCL17, CCL19, CCL20, CCL21, CCL25 CCR3, CCR4, CD3, CD19, CD20, CD24, CD27, CD28, CD38, CD39, CD40, CD40L, CD47, CD52, CD70, CD80, CD86, CD123, CD133, CD137, CD137L, CD160, CD272, CEACAM5, CLEC9, CLEC91, CRTH2, CSF-1, CSF-2, CSF-3, CXCL1, CXCL2, CXCL4, CXCL12, CXCL13, CXCR3, cMet, CTLA4, DLL3, DNGR-1, E-cadherin, EGFR, ENTPD1, EpCAM, FCER1, FCER1A, FCER2, FGFR, FLAP, FOLH1, Gi24, GITR, GITRL, GPR5, HER2, HER3, ICOSL, ICOS, HHLA2, HMGB1, HVEM, IDO, IFNa, IgE, IGF1R, IL2Rbeta, IL1, IL1A, IL1B, IL1F10, IL2, IL4, IL4Ra, IL5, IL5R, IL6, IL7, IL7Ra, IL8, IL9, IL9R, IL10, rhIL10, 1L12, IL13, IL13Ra1, IL13Ra2, IL15, IL17, IL17Rb, IL18, IL22, IL23, IL25, IL7, IL33, IL35, ITGB4, ITK, KIR, LAG3, LAMP1, leptin, LPFS2, MHC class II, MUC-1, MUC-16, NCR3LG1, NKG2D, NKp46, NTPDase-1, OX40, OX40L, PD-1, PD-L1, PD-L2, PROM1, S152, SIRPalpha, SISP1, SLC, SPG64, ST2, STEAP1, STEAP2, Syk kinase, STEAP1, TROP2, TACI, TDO, T14, TIGIT, TIM3, TLR, TLR2, TLR4, TLR5, TLR9, TMEF1, TNFa, TNFRSF7, Tp55, TREM1, TSLP, TSLPR, TWEAK, VEGF, VISTA, Vstm3, WUCAM, DLL4, TGFbeta, GP100, GPRC5D, CD30 or CD16A. The antigen binding polypeptide described herein or the polypeptides of the antigen binding polypeptide complex described herein may comprise any combination of VH1, VH2, VH3, VH4, VH5, VH6, VL1, VL2, VL3, VL4, VL5 and/or VL6 that bind the targets described herein. For example, VH1, VH2, VH3, VH4, VH5, VH6, VL1, VL2, VL3, VL4, VL5 and/or VL6 may specifically bind one or more of: CD3, CD28, CD38, CD19, CD20, Trop2 and cMet. For example, VL1 may specifically bind CD3. For example, VL1 may specifically bind CD19. For example, VL1 may specifically bind HER2. For example, VL1 may specifically bind CD20. For example, VL1 may specifically bind CD28. For example, VL1 may specifically bind CD38. For example, VL1 may specifically bind Trop2. For example, VL1 may specifically bind cMet. For example, VL2 may specifically bind CD3. For example, VL2 may specifically bind CD19. For example, VL2 may specifically bind HER2. For example, VL2 may specifically bind CD20. For example, VL2 may specifically bind CD28. For example, VL2 may specifically bind CD38. For example, VL2 may specifically bind Trop2. For example, VL2 may specifically bind cMet. For example, VL3 may specifically bind CD3. For example, VL3 may specifically bind CD19. For example, VL3 may specifically bind HER2. For example, VL3 may specifically bind CD20. For example, VL3 may specifically bind CD28. For example, VL3 may specifically bind CD38. For example, VL3 may specifically bind Trop2. For example, VL3 may specifically bind cMet. For example, VL4 may specifically bind CD3. For example, VL4 may specifically bind CD19. For example, VL4 may specifically bind HER2. For example, VL4 may specifically bind CD20. For example, VL4 may specifically bind CD28. For example, VL4 may specifically bind CD38. For example, VL4 may specifically bind Trop2. For example, VL4 may specifically bind cMet. For example, VL5 may specifically bind CD3. For example, VL5 may specifically bind CD19. For example, VL5 may specifically bind HER2. For example, VL5 may specifically bind CD20. For example, VL5 may specifically bind CD28. For example, VL5 may specifically bind CD38. For example, VL5 may specifically bind Trop2. For example, VL5 may specifically bind cMet. For example, VL6 may specifically bind CD3. For example, VL6 may specifically bind CD19. For example, VL6 may specifically bind HER2. For example, VL6 may specifically bind CD20. For example, VL6 may specifically bind CD28. For example, VL6 may specifically bind CD38. For example, VL6 may specifically bind Trop2. For example, VL6 may specifically bind cMet. For example, VH1 may specifically bind CD3. For example, VH1 may specifically bind CD19. For example, VH1 may specifically bind HER2. For example, VH1 may specifically bind CD20. For example, VH1 may specifically bind CD28. For example, VH1 may specifically bind CD38. For example, VH1 may specifically bind Trop2. For example, VH1 may specifically bind cMet. For example, VH2 may specifically bind CD3. For example, VH2 may specifically bind CD19. For example, VH2 may specifically bind HER2. For example, VH2 may specifically bind CD20. For example, VH2 may specifically bind CD28. For example, VH2 may specifically bind CD38. For example, VH2 may specifically bind Trop2. For example, VH2 may specifically bind cMet. For example, VH3 may specifically bind CD3. For example, VH3 may specifically bind CD19. For example, VH3 may specifically bind HER2. For example, VH3 may specifically bind CD20. For example, VH3 may specifically bind CD28. For example, VH3 may specifically bind CD38. For example, VH3 may specifically bind Trop2. For example, VH3 may specifically bind cMet. For example, VH4 may specifically bind CD3. For example, VH4 may specifically bind CD19. For example, VH4 may specifically bind HER2. For example, VH4 may specifically bind CD20. For example, VH4 may specifically bind CD28. For example, VH4 may specifically bind CD38. For example, VH4 may specifically bind Trop2. For example, VH4 may specifically bind cMet. For example, VH5 may specifically bind CD3. For example, VH5 may specifically bind CD19. For example, VH5 may specifically bind HER2. For example, VH5 may specifically bind CD20. For example, VH5 may specifically bind CD28. For example, VH5 may specifically bind CD38. For example, VH5 may specifically bind Trop2. For example, VH5 may specifically bind cMet. For example, VH6 may specifically bind CD3. For example, VH6 may specifically bind CD19. For example, VH6 may specifically bind HER2. For example, VH6 may specifically bind CD20. For example, VH6 may specifically bind CD28. For example, VH6 may specifically bind CD38. For example, VH6 may specifically bind Trop2. For example, VH6 may specifically bind cMet. In some aspects, the VH1 and VL1 of the antigen binding polypeptide or antigen binding polypeptide complex specifically binds to CD28, VH2 and VL2 specifically bind to CD3, and VH3 and VL3 specifically bind to CD38. In some aspects, the VH1 and VL1 of the antigen binding polypeptide or antigen binding polypeptide complex specifically binds to CD28, VH2 and VL2 specifically bind to CD38, and VH3 and VL3 specifically bind to CD3. In some aspects, the VH1 and VL1 of the antigen binding polypeptide or antigen binding polypeptide complex specifically binds to CD3, VH2 and VL2 specifically bind to CD38, and VH3 and VL3 specifically bind to CD28. In some aspects, the VH1 and VL1 of the antigen binding polypeptide or antigen binding polypeptide complex specifically binds to CD3, VH2 and VL2 specifically bind to CD28, and VH3 and VL3 specifically bind to CD38. In some aspects, the VH1 and VL1 of the antigen binding polypeptide or antigen binding polypeptide complex specifically binds to CD38, VH2 and VL2 specifically bind to CD28, and VH3 and VL3 specifically bind to CD3. In some aspects, the VH1 and VL1 of the antigen binding polypeptide or antigen binding polypeptide complex specifically binds to CD38, VH2 and VL2 specifically bind to CD3, and VH3 and VL3 specifically bind to CD28. In some aspects, the VH1 and VL1 of the antigen binding polypeptide or antigen binding polypeptide complex specifically binds to CD28, VH2 and VL2 specifically bind to CD19, and VH3 and VL3 specifically bind to CD38. In some aspects, the VH1 and VL1 of the antigen binding polypeptide or antigen binding polypeptide complex specifically binds to CD28, VH2 and VL2 specifically bind to CD38, and VH3 and VL3 specifically bind to CD19. In some aspects, the VH1 and VL1 of the antigen binding polypeptide or antigen binding polypeptide complex specifically binds to CD19, VH2 and VL2 specifically bind to CD38, and VH3 and VL3 specifically bind to CD28. In some aspects, the VH1 and VL1 of the antigen binding polypeptide or antigen binding polypeptide complex specifically binds to CD19, VH2 and VL2 specifically bind to CD28, and VH3 and VL3 specifically bind to CD38. In some aspects, the VH1 and VL1 of the antigen binding polypeptide or antigen binding polypeptide complex specifically binds to CD38, VH2 and VL2 specifically bind to CD28, and VH3 and VL3 specifically bind to CD19. In some aspects, the VH1 and VL1 of the antigen binding polypeptide or antigen binding polypeptide complex specifically binds to CD38, VH2 and VL2 specifically bind to CD19, and VH3 and VL3 specifically bind to CD28. Any of the antigen binding polypeptide structures and any of the antigen binding polypeptide complex structures described herein may be used to target one or more of the targets described herein. For example, the invention is directed to an antigen binding polypeptide or antigen binding polypeptide complex that specifically binds to EGFR and cMet. For example, the invention is directed to an antigen binding polypeptide or antigen binding polypeptide complex that specifically binds to GP100 and CD3. For example, the invention is directed to an antigen binding polypeptide or antigen binding polypeptide complex that specifically binds to CD20 and CD3. For example, the invention is directed to an antigen binding polypeptide or antigen binding polypeptide complex that specifically binds to BCMA and CD3. For example, the invention is directed to an antigen binding polypeptide or antigen binding polypeptide complex that specifically binds to PDL1 and CTLA4. For example, the invention is directed to an antigen binding polypeptide or antigen binding polypeptide complex that specifically binds to PD1 and LAG3. For example, the invention is directed to an antigen binding polypeptide or antigen binding polypeptide complex that specifically binds to PD1 and VEGF For example, the invention is directed to an antigen binding polypeptide or antigen binding polypeptide complex that specifically binds to DLL4 and VEGF. For example, the invention is directed to an antigen binding polypeptide or antigen binding polypeptide complex that specifically binds to EGFR and HER3. For example, the invention is directed to an antigen binding polypeptide or antigen binding polypeptide complex that specifically binds to HER2. For example, the invention is directed to an antigen binding polypeptide or antigen binding polypeptide complex that specifically binds to EpCAM and CD3. For example, the invention is directed to an antigen binding polypeptide or antigen binding polypeptide complex that specifically binds to PDL1 and TGFbeta. For example, the invention is directed to an antigen binding polypeptide or antigen binding polypeptide complex that specifically binds to PDL1 and TGFbeta. For example, the invention is directed to an antigen binding polypeptide or antigen binding polypeptide complex that specifically binds to GPRC5D and CD3. For example, the invention is directed to an antigen binding polypeptide or antigen binding polypeptide complex that specifically binds to CD123 and CD3. For example, the invention is directed to an antigen binding polypeptide or antigen binding polypeptide complex that specifically binds to CD30 and CD16A. For example, the invention is directed to an antigen binding polypeptide or antigen binding polypeptide complex that specifically binds to DLL3 and CD3.

[0162] For example, the antigen binding polypeptide or antigen binding polypeptide complex specifically binds at least one epitope on each of EGFR and cMet. For example, the antigen binding polypeptide or antigen binding polypeptide complex specifically binds at least one epitope on each of GP100 and CD3. For example, the antigen binding polypeptide or antigen binding polypeptide complex specifically binds at least one epitope on each of CD20 and CD3. For example, the antigen binding polypeptide or antigen binding polypeptide complex specifically binds at least one epitope on each of BCMA and CD3. For example, the antigen binding polypeptide or antigen binding polypeptide complex specifically binds at least one epitope on each of PDL1 and CTLA4. For example, the antigen binding polypeptide or antigen binding polypeptide complex specifically binds at least one epitope on each of PD1 and LAG3. For example, the antigen binding polypeptide or antigen binding polypeptide complex specifically binds at least one epitope on each of PD1 and VEGF. For example, the antigen binding polypeptide or antigen binding polypeptide complex specifically binds at least one epitope on each of DLL4 and VEGF. For example, the antigen binding polypeptide or antigen binding polypeptide complex specifically binds at least one epitope on each of EGFR and HER3. For example, the antigen binding polypeptide or antigen binding polypeptide complex specifically binds at least one epitope on HER2. For example, the antigen binding polypeptide or antigen binding polypeptide complex specifically binds at least one epitope on each of EpCAM and CD3. For example, the antigen binding polypeptide or antigen binding polypeptide complex specifically binds at least one epitope on each of PDL1 and TGFbeta. For example, the antigen binding polypeptide or antigen binding polypeptide complex specifically binds at least one epitope on each of PDL1 and TGF beta. For example, the antigen binding polypeptide or antigen binding polypeptide complex specifically binds at least one epitope on each of GPRC5D and CD3. For example, the antigen binding polypeptide or antigen binding polypeptide complex specifically binds at least one epitope on each of CD123 and CD3. For example, the antigen binding polypeptide or antigen binding polypeptide complex specifically binds at least one epitope on each of CD30 and CD16A. For example, the antigen binding polypeptide or antigen binding polypeptide complex specifically binds at least one epitope on each of DLL3 and CD3.

[0163] For example, the antigen binding polypeptide or polypeptide comprised within the antigen binding complex may comprise a VL1, VL2, VL3, VL4, VL5, VL6, VH1, VH2, VH3, VH4, VH5 and/or VH6 that specifically binds to EGFR and a VL1, VL2, VL3, VL4, VL5, VL6, VH1, VH2, VH3, VH4, VH5 and/or VH6 that specifically binds to cMet. For example, the antigen binding polypeptide or polypeptide comprised within the antigen binding complex may comprise a VL1, VL2, VL3, VL4, VL5, VL6, VH1, VH2, VH3, VH4, VH5 and/or VH6 that specifically binds to GP100 and a VL1, VL2, VL3, VL4, VL5, VL6, VH1, VH2, VH3, VH4, VH5 and/or VH6 that specifically binds to CD3. For example, the antigen binding polypeptide or polypeptide comprised within the antigen binding complex may comprise a VL1, VL2, VL3, VL4, VL5, VL6, VH1, VH2, VH3, VH4, VH5 and/or VH6 that specifically binds to CD20 and a VL1, VL2, VL3, VL4, VL5, VL6, VH1, VH2, VH3, VH4, VH5 and/or VH6 that specifically binds to CD3. For example, the antigen binding polypeptide or polypeptide comprised within the antigen binding complex may comprise a VL1, VL2, VL3, VL4, VL5, VL6, VH1, VH2, VH3, VH4, VH5 and/or VH6 that specifically binds to BCMA and a VL1, VL2, VL3, VL4, VL5, VL6, VH1, VH2, VH3, VH4, VH5 and/or VH6 that specifically binds to CD3. For example, the antigen binding polypeptide or polypeptide comprised within the antigen binding complex may comprise a VL1, VL2, VL3, VL4, VL5, VL6, VH1, VH2, VH3, VH4, VH5 and/or VH6 that specifically binds to PDL1 and a VL1, VL2, VL3, VL4, VL5, VL6, VH1, VH2, VH3, VH4, VH5 and/or VH6 that specifically binds to CTLA4. For example, the antigen binding polypeptide or polypeptide comprised within the antigen binding complex may comprise a VL1, VL2, VL3, VL4, VL5, VL6, VH1, VH2, VH3, VH4, VH5 and/or VH6 that specifically binds to PD1 and a VL1, VL2, VL3, VL4, VL5, VL6, VH1, VH2, VH3, VH4, VH5 and/or VH6 that specifically binds to LAG3. For example, the antigen binding polypeptide or polypeptide comprised within the antigen binding complex may comprise a VL1, VL2, VL3, VL4, VL5, VL6, VH1, VH2, VH3, VH4, VH5 and/or VH6 that specifically binds to PD1 and a VL1, VL2, VL3, VL4, VL5, VL6, VH1, VH2, VH3, VH4, VH5 and/or VH6 that specifically binds to VEGF. For example, the antigen binding polypeptide or polypeptide comprised within the antigen binding complex may comprise a VL1, VL2, VL3, VL4, VL5, VL6, VH1, VH2, VH3, VH4, VH5 and/or VH6 that specifically binds to DLL4 and a VL1, VL2, VL3, VL4, VL5, VL6, VH1, VH2, VH3, VH4, VH5 and/or VH6 that specifically binds to VEGF. For example, the antigen binding polypeptide or polypeptide comprised within the antigen binding complex may comprise a VL1, VL2, VL3, VL4, VL5, VL6, VH1, VH2, VH3, VH4, VH5 and/or VH6 that specifically binds to EGFR and a VL1, VL2, VL3, VL4, VL5, VL6, VH1, VH2, VH3, VH4, VH5 and/or VH6 that specifically binds to HER3. For example, the antigen binding polypeptide or polypeptide comprised within the antigen binding complex may comprise a VL1, VL2, VL3, VL4, VL5, VL6, VH1, VH2, VH3, VH4, VH5 and/or VH6 that specifically binds to HER2 and a VL1, VL2, VL3, VL4, VL5, VL6, VH1, VH2, VH3, VH4, VH5 and/or VH6 that specifically binds to HER2. For example, the antigen binding polypeptide or polypeptide comprised within the antigen binding complex may comprise a VL1, VL2, VL3, VL4, VL5, VL6, VH1, VH2, VH3, VH4, VH5 and/or VH6 that specifically binds to EpCAM and a VL1, VL2, VL3, VL4, VL5, VL6, VH1, VH2, VH3, VH4, VH5 and/or VH6 that specifically binds to CD3. For example, the antigen binding polypeptide or polypeptide comprised within the antigen binding complex may comprise a VL1, VL2, VL3, VL4, VL5, VL6, VH1, VH2, VH3, VH4, VH5 and/or VH6 that specifically binds to PDL1 and a VL1, VL2, VL3, VL4, VL5, VL6, VH1, VH2, VH3, VH4, VH5 and/or VH6 that specifically binds to TGFbeta. For example, the antigen binding polypeptide or polypeptide comprised within the antigen binding complex may comprise a VL1, VL2, VL3, VL4, VL5, VL6, VH1, VH2, VH3, VH4, VH5 and/or VH6 that specifically binds to PDL1 and a VL1, VL2, VL3, VL4, VL5, VL6, VH1, VH2, VH3, VH4, VH5 and/or VH6 that specifically binds to TGFbeta. For example, the antigen binding polypeptide or polypeptide comprised within the antigen binding complex may comprise a VL1, VL2, VL3, VL4, VL5, VL6, VH1, VH2, VH3, VH4, VH5 and/or VH6 that specifically binds to GPRC5D and a VL1, VL2, VL3, VL4, VL5, VL6, VH1, VH2, VH3, VH4, VH5 and/or VH6 that specifically binds to CD3. For example, the antigen binding polypeptide or polypeptide comprised within the antigen binding complex may comprise a VL1, VL2, VL3, VL4, VL5, VL6, VH1, VH2, VH3, VH4, VH5 and/or VH6 that specifically binds to CD123 and a VL1, VL2, VL3, VL4, VL5, VL6, VH1, VH2, VH3, VH4, VH5 and/or VH6 that specifically binds to CD3. For example, the antigen binding polypeptide or polypeptide comprised within the antigen binding complex may comprise a VL1, VL2, VL3, VL4, VL5, VL6, VH1, VH2, VH3, VH4, VH5 and/or VH6 that specifically binds to CD30 and a VL1, VL2, VL3, VL4, VL5, VL6, VH1, VH2, VH3, VH4, VH5 and/or VH6 that specifically binds to CD16A. For example, the antigen binding polypeptide or polypeptide comprised within the antigen binding complex may comprise a VL1, VL2, VL3, VL4, VL5, VL6, VH1, VH2, VH3, VH4, VH5 and/or VH6 that specifically binds to DLL3 and a VL1, VL2, VL3, VL4, VL5, VL6, VH1, VH2, VH3, VH4, VH5 and/or VH6 that specifically binds to CD3.

[0164] In other aspects, the invention is directed to an antigen binding polypeptide or antigen binding polypeptide complex that specifically binds to Ang-2 and VEGF-A. For example, the antigen binding polypeptide or antigen binding polypeptide complex specifically binds at least one epitope on each of Ang-2 and VEGF-A. For example, the antigen binding polypeptide or polypeptide comprised within the antigen binding complex may comprise a VL1, VL2, VL3, VL4, VL5, VL6, VH1, VH2, VH3, VH4, VH5 and/or VH6 that specifically binds to Ang-2 and a VL1, VL2, VL3, VL4, VL5, VL6, VH1, VH2, VH3, VH4, VH5 and/or VH6 that specifically binds to VEGF-A.

[0165] In other aspects, the invention is directed to an antigen binding polypeptide or antigen binding polypeptide complex that specifically binds to Factor IXa and Factor X. For example, the antigen binding polypeptide or antigen binding polypeptide complex specifically binds at least one epitope on each of Factor IXa and Factor X. For example, the antigen binding polypeptide or polypeptide comprised within the antigen binding complex may comprise a VL1, VL2, VL3, VL4, VL5, VL6, VH1, VH2, VH3, VH4, VH5 and/or VH6 that specifically binds to Factor IXa and a VL1, VL2, VL3, VL4, VL5, VL6, VH1, VH2, VH3, VH4, VH5 and/or VH6 that specifically binds to Factor X.

[0166] Antigen binding sequences (e.g., CDR, VH, VL, heavy chain and light chain sequences from antibodies) for A2AR, APRIL, ATPDase, BAFF, BAFFR, BCMA, BlyS, BTK, BTLA, B7DC, B7H1, B7H2, B7H3, B7H4, B7H5, B7H6, B7H7, B7RP1, B7-4, C3, C5, CCL2, CCL3, CCL4, CCL5, CCL7, CCL8, CCLI1, CCL15, CCL17, CCL19, CCL20, CCL21, CCL25 CCR3, CCR4, CD3, CD19, CD20, CD24, CD27, CD28, CD38, CD39, CD40, CD40L, CD47, CD52, CD70, CD80, CD86, CD123, CD133, CD137, CD137L, CD160, CD272, CEACAM5, CLEC9, CLEC91, CRTH2, CSF-1, CSF-2, CSF-3, CXCL1, CXCL2, CXCL4, CXCL12, CXCL13, CXCR3, cMet, CTLA4, DLL3, DNGR-1, E-cadherin, EGFR, ENTPD1, EpCAM, FCER1, FCER1A, FCER2, FGFR, FLAP, FOLH1, Gi24, GITR, GITRL, GPR5, HER2, HER3, ICOSL, ICOS, HHLA2, HMGB1, HVEM, IDO, IFNa, IgE, IGF1R, IL2Rbeta, ILL, IL1A, IL1B, IL1F10, IL2, IL4, IL4Ra, IL5, IL5R, IL6, IL7, IL7Ra, IL8, IL9, IL9R, IL10, rhIL10, IL12, IL13, IL13Ra1, IL13Ra2, IL15, IL17, IL7Rb, IL18, IL22, IL23, IL25, IL7, IL33, IL35, ITGB4, ITK, KIR, LAG3, LAMP1, leptin, LPFS2, MHC class II, MUC-1, MUC-16, NCR3LG1, NKG2D, NKp46, NTPDase-1, OX40, OX40L, PD-1, PD-L1, PD-L2, PROM1, S152, SIRPalpha, SISP1, SLC, SPG64, ST2, STEAP1, STEAP2, Syk kinase, STEAP1, TROP2, TACI, TDO, T14, TIGIT, TIM3, TLR, TLR2, TLR4, TLRS, TLR9, TMEF1, TNFa, TNFRSF7, Tp55, TREM1, TSLP, TSLPR, TWEAK, VEGF, VISTA, Vstm3, WUCAM, DLL4, TGFbeta, GP100, GPRC5D, CD30 and CD16A are well known. Such sequences include, but are not limited to, GenBank Accession Nos. AAA39272.1, AAA39159.1, ABN79462.1, AVW80143.1, AVW80142.1, AVW80141.1, AAB34430.1, AAB34429.1, CAD45042.1, 4CMH_C and 4CMH_B. Such sequences are also described, for example, in Wernly et al., Cells, 9(2):295, 2020; Arakawa et al., Journal of Biochemistry, 120(3):657-662, 1996; Cole et al., Transplantation, 68(4):563-571, 1999; L1 et al., International Immunopharmacology, 62:299-308, 2018; Castella et al., Methods & Clinical Development, 12:134-144, 2019; Sun et al., Molecular Immunology, 41(9):929-938, 2004; Iwaszkiewicz-Grzes et al., Cytotherapy, 22(11):629-641, 2020, Rosinski et al., Transplant Direct, 1(2):e7, 2015; Ellis et al., J Immunology, 155(2):925-937, 1995; Stevenson et al., Blood, 77(5):1071-1079, 1991; Chillemi et al., Molecular Medicine, 19:99-108, 2013, and Int'l Pub. No. WO 2020/076853.

[0167] In addition, molecular biology and recombinant DNA methods for making, screening and engineering antigen binding complexes and antibodies containing such sequences are well known and described, for example, in Adair et al. Human Antibodies, 5(1-2):41-47, 1994; Kostelny et al., J Immunol, 148(5):1547-1553 (1992), Shiraiwa et al., Methods, 154:10-20, 2019; and Zola, “Monoclonal Antibodies: A Manual of Techniques,” 1987, 1^{st} Ed., CRC Press; and Steinitz, Human Antibodies, 18(1-2):1-10, 2009.

[0168] In some aspects, the invention is directed to an antigen binding polypeptide complex comprising a first polypeptide and a second polypeptide; wherein the first polypeptide has a structure represented by VL1-VL2-VH2-VH1; VH1-VH2-VL2-VL1; VL1-L1-VL2-L2-VH2-L3-VH1; or VH1-L1-VH2-L2-VL2-L3-VL1; wherein the second polypeptide has a structure represented by VL3-VH3; VH3-VL3; VL3-L4-VH3; or VH3-L4-VL3; wherein VL1 is a first immunoglobulin light chain variable region that specifically binds to A2AR, APRIL, ATPDase, BAFF, BAFFR, BCMA, BlyS, BTK, BTLA, B7DC, B7H1, B7B2, B7B3, B7B4, B7B5, B7B6, B7H7, B7RP1, B7-4, C3, C5, CCL2, CCL3, CCL4, CCL5, CCL7, CCL8, CCL11, CCL15, CCL17, CCL19, CCL20, CCL21, CCL25 CCR3, CCR4, CD3, CD19, CD20, CD24, CD27, CD28, CD38, CD39, CD40, CD40L, CD47, CD52, CD70, CD80, CD86, CD123, CD133, CD137, CD137L, CD160, CD272, CEACAM5, CLEC9, CLEC91, CRTH2, CSF-1, CSF-2, CSF-3, CXCL1, CXCL2, CXCL4, CXCL12, CXCL13, CXCR3, cMet, CTLA4, DLL3, DNGR-1, E-cadherin, EGFR, ENTPD1, EpCAM, FCER1, FCER1A, FCER2, FGFR, FLAP, FOLH1, Gi24, GITR, GITRL, GPR5, HER2, HER3, ICOSL, ICOS, HHLA2, HMGB1, HVEM, IDO, IFNa, IgE, IGF1R, IL2Rbeta, IL1, IL1A, IL1B, IL1F10, IL2, IL4, IL4Ra, IL5, IL5R, IL6, IL7, IL7Ra, IL8, IL9, IL9R, IL10, rhIL10, IL12, IL13, IL13Ra1, IL13Ra2, IL15, I17, IL17Rb, IL18, IL22, IL23, IL25, IL7, IL33, IL35, ITGB4, ITK, KIR, LAG3, LAMP1, leptin, LPFS2, MHC class II, MUC-1, MUC-16, NCR3LG1, NKG2D, NKp46, NTPDase-1, OX40, OX40L, PD-1, PD-L1, PD-L2, PROM1, S1S2, SIRPalpha, SISP1, SLC, SPG64, ST2, STEAP1, STEAP2, Syk kinase, STEAP1, TROP2, TACI, TDO, T14, TIGIT, TIM3, TLR, TLR2, TLR4, TLR5, TLR9, TMEF1, TNFa, TNFRSF7, Tp55, TREM1, TSLP, TSLPR, TWEAK, VEGF, VISTA, Vstm3, WUCAM, DLL4, TGFbeta, GP100, GPRC5D, CD30 or CD16A; VL2 is a second immunoglobulin light chain variable region that specifically binds to A2AR, APRIL, ATPDase, BAFF, BAFFR, BCMA, BlyS, BTK, BTLA, B7DC, B7H1, B7H2, B7H3, B7H4, B7H5, B7H6, B7H7, B7RP1, B7-4, C3, C5, CCL2, CCL3, CCL4, CCL5, CCL7, CCL8, CCL11, CCL15, CCL17, CCL19, CCL20, CCL21, CCL25 CCR3, CCR4, CD3, CD19, CD20, CD24, CD27, CD28, CD38, CD39, CD40, CD40L, CD47, CD52, CD70, CD80, CD86, CD123, CD133, CD137, CD137L, CD160, CD272, CEACAM5, CLEC9, CLEC91, CRTH2, CSF-1, CSF-2, CSF-3, CXCL1, CXCL2, CXCL4, CXCL12, CXCL13, CXCR3, cMet, CTLA4, DLL3, DNGR-1, E-cadherin, EGFR, ENTPD1, EpCAM, FCER1, FCER1A, FCER2, FGFR, FLAP, FOLH1, Gi24, GITR, GITRL, GPR5, HER2, HER3, ICOSL, ICOS, HHLA2, HMGB1, HVEM, IDO, IFNa, IgE, IGF1R, IL2Rbeta, IL1, IL1A, IL1B, IL1F10, IL2, I4, IL4Ra, IL5, IL5R, IL6, IL7, IL7Ra, IL8, IL9, IL9R, IL10, rhIL10, IL12, IL13, IL13Ra1, IL13Ra2, IL15, IL17, IL17Rb, IL18, IL22, IL23, IL25, IL7, IL33, IL35, ITGB4, ITK, KIR, LAG3, LAMP1, leptin, LPFS2, MHC class II, MUC-1, MUC-16, NCR3LG1, NKG2D, NKp46, NTPDase-1, OX40, OX40L, PD-1, PD-L1, PD-L2, PROM1, S152, SIRPalpha, SISP1, SLC, SPG64, ST2, STEAP1, STEAP2, Syk kinase, STEAP1, TROP2, TACI, TDO, T14, TIGIT, TIM3, TLR, TLR2, TLR4, TLR5, TLR9, TMEF1, TNFa, TNFRSF7, Tp55, TREM1, TSLP, TSLPR, TWEAK, VEGF, VISTA, Vstm3, WUCAM, DLL4, TGFbeta, GP100, GPRC5D, CD30 or CD16A; VL3 is a third immunoglobulin light chain variable region that specifically binds to A2AR, APRIL, ATPDase, BAFF, BAFFR, BCMA, BlyS, BTK, BTLA, B7DC, B7H1, B7H2, B7H3, B7H4, B7H5, B7H6, B7H7, B7RP1, B7-4, C3, C5, CCL2, CCL3, CCL4, CCL5, CCL7, CCL8, CCL11, CCL15, CCL17, CCL19, CCL20, CCL21, CCL25 CCR3, CCR4, CD3, CD19, CD20, CD24, CD27, CD28, CD38, CD39, CD40, CD40L, CD47, CD52, CD70, CD80, CD86, CD123, CD133, CD137, CD137L, CD160, CD272, CEACAM5, CLEC9, CLEC91, CRTH2, CSF-1, CSF-2, CSF-3, CXCL1, CXCL2, CXCL4, CXCL12, CXCL13, CXCR3, cMet, CTLA4, DLL3, DNGR-1, E-cadherin, EGFR, ENTPD1, EpCAM, FCER1, FCER1A, FCER2, FGFR, FLAP, FOLH1, Gi24, GITR, GITRL, GPR5, HER2, HER3, ICOSL, ICOS, HHLA2, HMGB1, HVEM, IDO, IFNa, IgE, IGF1R, IL2Rbeta, IL1, IL1A, IL1B, IL1F10, IL2, IL4, IL4Ra, IL5, IL5R, IL6, IL7, IL7Ra, IL8, IL9, IL9R, IL10, rhIL10, IL12, IL13, IL13Ra1, IL13Ra2, IL15, I17, IL17Rb, IL18, IR22, IL23, IL25, IL7, IL33, IL35, ITGB4, ITK, KIR, LAG3, LAMP1, leptin, LPFS2, MHC class II, MUC-1, MUC-16, NCR3LG1, NKG2D, NKp46, NTPDase-1, OX40, OX40L, PD-1, PD-L1, PD-L2, PROM1, S152, SIRPalpha, SISP1, SLC, SPG64, ST2, STEAP1, STEAP2, Syk kinase, STEAP1, TROP2, TACI, TDO, T14, TIGIT, TIM3, TLR, TLR2, TLR4, TLR5, TLR9, TMEF1, TNFa, TNFRSF7, Tp55, TREM1, TSLP, TSLPR, TWEAK, VEGF, VISTA, Vstm3, WUCAM, DLL4, TGFbeta, GP100, GPRC5D, CD30 or CD16A; VH1 is a first immunoglobulin heavy chain variable region that specifically binds to A2AR, APRIL, ATPDase, BAFF, BAFFR, BCMA, BlyS, BTK, BTLA, B7DC, B7H1, B7H2, B7H3, B7H4, B7H5, B7H6, B7H7, B7RP1, B7-4, C3, C5, CCL2, CCL3, CCL4, CCL5, CCL7, CCL8, CCL11, CCL15, CCL17, CCL19, CCL20, CCL21, CCL25 CCR3, CCR4, CD3, CD19, CD20, CD24, CD27, CD28, CD38, CD39, CD40, CD40L, CD47, CD52, CD70, CD80, CD86, CD123, CD133, CD137, CD137L, CD160, CD272, CEACAM5, CLEC9, CLEC91, CRTH2, CSF-1, CSF-2, CSF-3, CXCL1, CXCL2, CXCL4, CXCL12, CXCL13, CXCR3, cMet, CTLA4, DLL3, DNGR-1, E-cadherin, EGFR, ENTPD1, EpCAM, FCER1, FCER1A, FCER2, FGFR, FLAP, FOLH1, Gi24, GITR, GITRL, GPR5, HER2, HER3, ICOSL, ICOS, HHLA2, HMGB1, HVEM, IDO, IFNa, IgE, IGF1R, IL2Rbeta, IL1, IL1A, IL1B, IL1F10, IL2, IL4, IL4Ra, IL5, IL5R, IL6, IL7, IL7Ra, IL8, IL9, IL9R, IL10, rhIL10, IL12, IL13, IL13Ra1, IL13Ra2, IL15, IL17, IL17Rb, IL18, IL22, IL23, IL25, IL7, IL33, IL35, ITGB4, ITK, KIR, LAG3, LAMP1, leptin, LPFS2, MHC class II, MUC-1, MUC-16, NCR3LG1, NKG2D, NKp46, NTPDase-1, OX40, OX40L, PD-1, PD-L1, PD-L2, PROM1, S152, SIRPalpha, SISP1, SLC, SPG64, ST2, STEAP1, STEAP2, Syk kinase, STEAP1, TROP2, TACI, TDO, T14, TIGIT, TIM3, TLR, TLR2, TLR4, TLR5, TLR9, TMEF1, TNFa, TNFRSF7, Tp55, TREM1, TSLP, TSLPR, TWEAK, VEGF, VISTA, Vstm3, WUCAM, DLL4, TGFbeta, GP100, GPRC5D, CD30 or CD16A; VH2 is a second immunoglobulin heavy chain variable region that specifically binds to A2AR, APRIL, ATPDase, BAFF, BAFFR, BCMA, BlyS, BTK, BTLA, B7DC, B7H1, B7H2, B7H3, B7H4, B7H5, B7H6, B7H7, B7RP1, B7-4, C3, C5, CCL2, CCL3, CCL4, CCL5, CCL7, CCL8, CCL11, CCL15, CCL17, CCL19, CCL20, CCL21, CCL25 CCR3, CCR4, CD3, CD19, CD20, CD24, CD27, CD28, CD38, CD39, CD40, CD40L, CD47, CD52, CD70, CD80, CD86, CD123, CD133, CD137, CD137L, CD160, CD272, CEACAM5, CLEC9, CLEC91, CRTH2, CSF-1, CSF-2, CSF-3, CXCL1, CXCL2, CXCL4, CXCL12, CXCL13, CXCR3, cMet, CTLA4, DLL3, DNGR-1, E-cadherin, EGFR, ENTPD1, EpCAM, FCER1, FCER1A, FCER2, FGFR, FLAP, FOLH1, Gi24, GITR, GITRL, GPR5, HER2, HER3, ICOSL, ICOS, HHLA2, HMGB1, HVEM, IDO, IFNa, IgE, IGF1R, IL2Rbeta, IL1, IL1A, IL1B, IL1F10, IL2, IL4, IL4Ra, IL5, IL5R, IL6, IL7, IL7Ra, IL8, IL9, IL9R, IL10, rhIL10, IL12, IL13, IL13Ra1, IL13Ra2, IL15, IL17, IL17Rb, IL18, IL22, IL23, IL25, IL7, IL33, IL35, ITGB4, ITK, KIR, LAG3, LAMP1, leptin, LPFS2, MHC class II, MUC-1, MUC-16, NCR3LG1, NKG2D, NKp46, NTPDase-1, OX40, OX40L, PD-1, PD-L1, PD-L2, PROM1, S152, SIRPalpha, SISP1, SLC, SPG64, ST2, STEAP1, STEAP2, Syk kinase, STEAP1, TROP2, TACI, TDO, T14, TIGIT, TIM3, TLR, TLR2, TLR4, TLR5, TLR9, TMEF1, TNFa, TNFRSF7, Tp55, TREM1, TSLP, TSLPR, TWEAK, VEGF, VISTA, Vstm3, WUCAM, DLL4, TGFbeta, GP100, GPRC5D, CD30 or CD16A; VH3 is a third immunoglobulin heavy chain variable region that specifically binds to A2AR, APRIL, ATPDase, BAFF, BAFFR, BCMA, BlyS, BTK, BTLA, B7DC, B7H1, B7H2, B7H3, B7H4, B7H5, B7H6, B7H7, B7RP1, B7-4, C3, C5, CCL2, CCL3, CCL4, CCL5, CCL7, CCL8, CCL11, CCL15, CCL17, CCL19, CCL20, CCL21, CCL25 CCR3, CCR4, CD3, CD19, CD20, CD24, CD27, CD28, CD38, CD39, CD40, CD40L, CD47, CD52, CD70, CD80, CD86, CD123, CD133, CD137, CD137L, CD160, CD272, CEACAM5, CLEC9, CLEC91, CRTH2, CSF-1, CSF-2, CSF-3, CXCL1, CXCL2, CXCL4, CXCL12, CXCL13, CXCR3, cMet, CTLA4, DLL3, DNGR-1, E-cadherin, EGFR, ENTPD1, EpCAM, FCER1, FCER1A, FCER2, FGFR, FLAP, FOLH1, Gi24, GITR, GITRL, GPR5, HER2, HER3, ICOSL, ICOS, HHLA2, HMGB1, HVEM, IDO, IFNa, IgE, IGF1R, IL2Rbeta, IL1, IL1A, IL1B, IL1F10, IL2, IL4, IL4Ra, IL5, IL5R, IL6, IL7, IL7Ra, IL8, IL9, IL9R, IL10, rhIL10, IL12, IL13, IL13Ra1, IL13Ra2, IL15, IL17, IL17Rb, IL18, IL22, IL23, IL25, IL7, IL33, IL35, ITGB4, ITK, KIR, LAG3, LAMP1, leptin, LPFS2, MHC class U, MUC-1, MUC-16, NCR3LG1, NKG2D, NKp46, NTPDase-1, OX40, OX40L, PD-1, PD-L1, PD-L2, PROM1, S152, SIRPalpha, SISP1, SLC, SPG64, ST2, STEAP1, STEAP2, Syk kinase, STEAP1, TROP2, TACI, TDO, T14, TIGIT, TIM3, TLR, TLR2, TLR4, TLR5, TLR9, TMEF1, TNFa, TNFRSF7, Tp55, TREM1, TSLP, TSLPR, TWEAK, VEGF, VISTA, Vstm3, WUCAM, DLL4, TGFbeta, GP100, GPRC5D, CD30 or CD16A; and L1, L2, L3 and L4 are amino acid linkers. In some aspects, the first polypeptide has a structure represented by VL1-VL2-VH2-VH1 and the second polypeptide has a structure represented by VL3-VH3. In some aspects, the first polypeptide has a structure represented by VL1-VL2-VH2-VH1 and the second polypeptide has a structure represented by VH3-VL3. In some aspects, the first polypeptide has a structure represented by VL1-VL2-VH2-VH1 and the second polypeptide has a structure represented by VL3-L4-VH3. In some aspects, the first polypeptide has a structure represented by VL1-VL2-VH2-VH1 and the second polypeptide has a structure represented by VH3-L4-VL3. In some aspects, the first polypeptide has a structure represented by VH1-VH2-VL2-VL1 and the second polypeptide has a structure represented by VL3-VH3. In some aspects, the first polypeptide has a structure represented by VH1-VH2-VL2-VL1 and the second polypeptide has a structure represented by VH3-VL3. In some aspects, the first polypeptide has a structure represented by VH1-VH2-VL2-VL1 and the second polypeptide has a structure represented by VL3-L4-VH3. In some aspects, the first polypeptide has a structure represented by VH1-VH2-VL2-VL1 and the second polypeptide has a structure represented by VH3-L4-VL3. In some aspects, the first polypeptide has a structure represented by VL1-L1-VL2-L2-VH2-L3-VH1 and the second polypeptide has a structure represented by VL3-VH3. In some aspects, the first polypeptide has a structure represented by VL1-L1-VL2-L2-VH2-L3-VH1 and the second polypeptide has a structure represented by VH3-VL3. In some aspects, the first polypeptide has a structure represented by VL1-L1-VL2-L2-VH2-L3-VH1 and the second polypeptide has a structure represented by VL3-L4-VH3. In some aspects, the first polypeptide has a structure represented by VL1-L1-VL2-L2-VH2-L3-VH1 and the second polypeptide has a structure represented by VH3-L4-VL3. In some aspects, the first polypeptide has a structure represented by VH1-L1-VH2-L2-VL2-L3-VL1 and the second polypeptide has a structure represented by VL3-VH3. In some aspects, the first polypeptide has a structure represented by VH1-L1-VH2-L2-VL2-L3-VL1 and the second polypeptide has a structure represented by VH3-VL3. In some aspects, the first polypeptide has a structure represented by VH1-L1-VH2-L2-VL2-L3-VL1 and the second polypeptide has a structure represented by VL3-L4-VH3. In some aspects, the first polypeptide has a structure represented by VH1-L1-VH2-L2-VL2-L3-VL1 and the second polypeptide has a structure represented by VH3-L4-VL3. The VL1, VL2, VL3, VH1, VH2, and/or VH3 may specifically bind to A2AR, APRIL, ATPDase, BAFF, BAFFR, BCMA, BlyS, BTK, BTLA, B7DC, B7H1, B7H2, B7H3, B7H4, B7H5, B7H6, B7H7, B7RP1, B7-4, C3, C5, CCL2, CCL3, CCL4, CCL5, CCL7, CCL8, CCL11, CCL15, CCL17, CCL19, CCL20, CCL21, CCL25 CCR3, CCR4, CD3, CD19, CD20, CD24, CD27, CD28, CD38, CD39, CD40, CD40L, CD47, CD52, CD70, CD80, CD86, CD123, CD133, CD137, CD137L, CD160, CD272, CEACAM5, CLEC9, CLEC91, CRTH2, CSF-1, CSF-2, CSF-3, CXCL1, CXCL2, CXCL4, CXCL12, CXCL13, CXCR3, cMet, CTLA4, DLL3, DNGR-1, E-cadherin, EGFR, ENTPD1, EpCAM, FCER1, FCER1A, FCER2, FGFR, FLAP, FOLH1, Gi24, GITR, GITRL, GPR5, HER2, HER3, ICOSL, ICOS, HHLA2, HMGB1, HVEM, IDO, IFNa, IgE, IGF1R, IL2Rbeta, IL1, IL1A, IL1B, IL1F10, IL2, IL4, IL4Ra, IL5, IL5R, IL6, IL7, IL7Ra, IL8, IL9, IL9R, IL10, rhIL10, IL12, IL13, IL13Ra1, IL13Ra2, IL15, IL17, IL17Rb, IL18, IL22, IL23, IL25, IL7, IL33, IL35, ITGB4, ITK, KIR, LAG3, LAMP1, leptin, LPFS2, MHC class II, MUC-1, MUC-16, NCR3LG1, NKG2D, NKp46, NTPDase-1, OX40, OX40L, PD-1, PD-L1, PD-L2, PROM1, S152, SIRPalpha, SISP1, SLC, SPG64, ST2, STEAP1, STEAP2, Syk kinase, STEAP1, TROP2, TACI, TDO, T14, TIGIT, TIM3, TLR, TLR2, TLR4, TLR5, TLR9, TMEF1, TNFa, TNFRSF7, Tp55, TREM1, TSLP, TSLPR, TWEAK, VEGF, VISTA, Vstm3, WUCAM, DLL4, TGFbeta, GP100, GPRC5D, CD30 or CD16A. For the avoidance of doubt, all the antigen binding polypeptide complex structures described herein can be combined with any one or more of the targets described herein. Any and all disclosure herein in relation to targets for antigen binding polypeptides of the invention is generally applicable, and applies equally and without reservation to each and every antigen binding polypeptide and antigen binding polypeptide complex described herein. For the avoidance of doubt, the VL1, VL2, VL3, VH1, VH2, and/or VH3 of each and every antigen binding polypeptide and antigen binding polypeptide complex described herein may independently bind to any one of said particularly preferred targets.

[0169] In other aspects, the invention is directed to an antigen binding polypeptide complex comprising a first polypeptide and a second polypeptide; wherein the first polypeptide has a structure represented by VL1-VL2-VH2-VH1-Fc; VH1-VH2-VL2-VL1-Fc; VL1-L1-VL2-L2-VH2-L3-VH1-Fc; VH1-L1-VH2-L2-VL2-L3-VL1-Fc; VL1-L1-VL2-L2-VH2-L3-VH1-L4-Fc; or VH1-L1-VH2-L2-VL2-L3-VL1-L4-Fc; wherein the second polypeptide has a structure represented by VL3-VH3-Fc; VH3-VL3-Fc; VL3-L1-VH3-Fc; or VH3-L1-VL3-Fc; wherein VL1 is a first immunoglobulin light chain variable region that specifically binds to A2AR, APRIL, ATPDase, BAFF, BAFFR, BCMA, BlyS, BTK, BTLA, B7DC, B7H1, B7H2, B7H3, B7H4, B7H5, B7H6, B7H7, B7RP1, B7-4, C3, C5, CCL2, CCL3, CCL4, CCL5, CCL7, CCL8, CCL11, CCL15, CCL17, CCL19, CCL20, CCL21, CCL25 CCR3, CCR4, CD3, CD19, CD20, CD24, CD27, CD28, CD38, CD39, CD40, CD40L, CD47, CD52, CD70, CD80, CD86, CD123, CD133, CD137, CD137L, CD160, CD272, CEACAM5, CLEC9, CLEC91, CRTH2, CSF-1, CSF-2, CSF-3, CXCL1, CXCL2, CXCL4, CXCL12, CXCL13, CXCR3, cMet, CTLA4, DLL3, DNGR-1, E-cadherin, EGFR, ENTPD1, EpCAM, FCER1, FCER1A, FCER2, FGFR, FLAP, FOLH1, Gi24, GITR, GITRL, GPR5, HER2, HER3, ICOSL, ICOS, HHLA2, HMGB1, HVEM, IDO, IFNa, IgE, IGF1R, IL2Rbeta, IL1, IL1A, IL1B, IL1F10, IL2, IL4, IL4Ra, IL5, IL5R, IL6, IL7, IL7Ra, IL8, IL9, IL9R, 110, rhIL10, IL12, IL13, IL13Ra1, IL13Ra2, IL15, 117, IL17Rb, IL18, IL22, IL23, IL25, IL7, IL33, IL35, ITGB4, ITK, KIR, LAG3, LAMP1, leptin, LPFS2, MHC class II, MUC-1, MUC-16, NCR3LG1, NKG2D, NKp46, NTPDase-1, OX40, OX40L, PD-1, PD-L1, PD-L2, PROM1, S1S2, SIRPalpha, SISP1, SLC, SPG64, ST2, STEAP1, STEAP2, Syk kinase, STEAP1, TROP2, TACI, TDO, T14, TIGIT, TIM3, TLR, TLR2, TLR4, TLR5, TLR9, TMEF1, TNFa, TNFRSF7, Tp55, TREM1, TSLP, TSLPR, TWEAK, VEGF, VISTA, Vstm3, WUCAM, DLL4, TGFbeta, GP100, GPRC5D, CD30 or CD16A; VL2 is a second immunoglobulin light chain variable region that specifically binds to A2AR, APRIL, ATPDase, BAFF, BAFFR, BCMA, BlyS, BTK, BTLA, B7DC, B7H1, B7H2, B7H3, B7H4, B7H5, B7H6, B7H7, B7RP1, B7-4, C3, C5, CCL2, CCL3, CCL4, CCL5, CCL7, CCL8, CCL11, CCL15, CCL17, CCL19, CCL20, CCL21, CCL25 CCR3, CCR4, CD3, CD19, CD20, CD24, CD27, CD28, CD38, CD39, CD40, CD40L, CD47, CD52, CD70, CD80, CD86, CD123, CD133, CD137, CD137L, CD160, CD272, CEACAM5, CLEC9, CLEC91, CRTH2, CSF-1, CSF-2, CSF-3, CXCL1, CXCL2, CXCL4, CXCL12, CXCL13, CXCR3, cMet, CTLA4, DLL3, DNGR-1, E-cadherin, EGFR, ENTPD1, EpCAM, FCER1, FCER1A, FCER2, FGFR, FLAP, FOLH1, Gi24, GITR, GITRL, GPR5, HER2, HER3, ICOSL, ICOS, HHLA2, HMGB1, HVEM, IDO, IFNa, IgE, IGF1R, IL2Rbeta, IL1, IL1A, IL1B, IL1F10, IL2, IL4, IL4Ra, IL5, IL5R, IL6, IL7, IL7Ra, IL8, IL9, IL9R, IL10, rhIL10, IL12, IL13, R13Ra1, IL13Ra2, IL15, IL17, IL17Rb, IL18, IL22, IL23, IL25, IL7, IL33, IL35, ITGB4, ITK, KIR, LAG3, LAMP1, leptin, LPFS2, MHC class II, MUC-1, MUC-16, NCR3LG1, NKG2D, NKp46, NTPDase-1, OX40, OX40L, PD-1, PD-L1, PD-L2, PROM1, S152, SIRPalpha, SISP1, SLC, SPG64, ST2, STEAP1, STEAP2, Syk kinase, STEAP1, TROP2, TACI, TDO, T14, TIGIT, TIM3, TLR, TLR2, TLR4, TLR5, TLR9, TMEF1, TNFa, TNFRSF7, Tp55, TREM1, TSLP, TSLPR, TWEAK, VEGF, VISTA, Vstm3, WUCAM, DLL4, TGFbeta, GP100, GPRC5D, CD30 or CD16A; VL3 is a third immunoglobulin light chain variable region that specifically binds to A2AR, APRIL, ATPDase, BAFF, BAFFR, BCMA, BlyS, BTK, BTLA, B7DC, B7H1, B7H2, B7H3, B7H4, B7H5, B7H6, B7H7, B7RP1, B7-4, C3, C5, CCL2, CCL3, CCL4, CCL5, CCL7, CCL8, CCL11, CCL15, CCL17, CCL19, CCL20, CCL21, CCL25 CCR3, CCR4, CD3, CD19, CD20, CD24, CD27, CD28, CD38, CD39, CD40, CD40L, CD47, CD52, CD70, CD80, CD86, CD123, CD133, CD137, CD137L, CD160, CD272, CEACAM5, CLEC9, CLEC91, CRTH2, CSF-1, CSF-2, CSF-3, CXCL1, CXCL2, CXCL4, CXCL12, CXCL13, CXCR3, cMet, CTLA4, DLL3, DNGR-1, E-cadherin, EGFR, ENTPD1, EpCAM, FCER1, FCER1A, FCER2, FGFR, FLAP, FOLH1, Gi24, GITR, GITRL, GPR5, HER2, HER3, ICOSL, ICOS, HHLA2, HMGB1, HVEM, IDO, IFNa, IgE, IGF1R, IL2Rbeta, IL1, IL1A, IL1B, IL1F10, IL2, IL4, IL4Ra, IL5, IL5R, IL6, IL7, IL7Ra, IL8, IL9, IL9R, IL10, rhIL10, IL12, IL13, IL13Ra1, IL13Ra2, IL15, 17, IL17Rb, IL18, IL22, IL23, IL25, IL7, IL33, IL35, ITGB4, ITK, KIR, LAG3, LAMP1, leptin, LPFS2, MHC class II, MUC-1, MUC-16, NCR3LG1, NKG2D, NKp46, NTPDase-1, OX40, OX40L, PD-1, PD-L1, PD-L2, PROM1, S152, SIRPalpha, SISP1, SLC, SPG64, ST2, STEAP1, STEAP2, Syk kinase, STEAP1, TROP2, TACI, TDO, T14, TIGIT, TIM3, TLR, TLR2, TLR4, TLRS, TLR9, TMEF1, TNFa, TNFRSF7, Tp55, TREM1, TSLP, TSLPR, TWEAK, VEGF, VISTA, Vstm3, WUCAM, DLL4, TGFbeta, GP100, GPRC5D, CD30 or CD16A; VH1 is a first immunoglobulin heavy chain variable region that specifically binds to A2AR, APRIL, ATPDase, BAFF, BAFFR, BCMA, BlyS, BTK, BTLA, B7DC, B7H1, B7H2, B7H3, B7H4, B7H5, B7H6, B7H7, B7RP1, B7-4, C3, C5, CCL2, CCL3, CCL4, CCL5, CCL7, CCL8, CCL11, CCL15, CCL17, CCL19, CCL20, CCL21, CCL25 CCR3, CCR4, CD3, CD19, CD20, CD24, CD27, CD28, CD38, CD39, CD40, CD40L, CD47, CD52, CD70, CD80, CD86, CD123, CD133, CD137, CD137L, CD160, CD272, CEACAM5, CLEC9, CLEC91, CRTH2, CSF-1, CSF-2, CSF-3, CXCL1, CXCL2, CXCL4, CXCL12, CXCL13, CXCR3, cMet, CTLA4, DLL3, DNGR-1, E-cadherin, EGFR, ENTPD1, EpCAM, FCER1, FCER1A, FCER2, FGFR, FLAP, FOLH1, Gi24, GITR, GITRL, GPR5, HER2, HER3, ICOSL, ICOS, HHLA2, HMGB1, HVEM, IDO, IFNa, IgE, IGF1R, IL2Rbeta, IL1, IL1A, IL1B, IL1F10, IL2, IL4, IL4Ra, IL5, IL5R, IL6, IL7, IL7Ra, IL8, IL9, IL9R, IL10, rhIL10, IL12, IL13, R13Ra1, IL13Ra2, IL15, IL17, IL17Rb, IL18, IL22, IL23, IL25, IL7, IL33, IL35, ITGB4, ITK, KIR, LAG3, LAMP1, leptin, LPFS2, MHC class II, MUC-1, MUC-16, NCR3LG1, NKG2D, NKp46, NTPDase-1, OX40, OX40L, PD-1, PD-L1, PD-L2, PROM1, S152, SIRPalpha, SISP1, SLC, SPG64, ST2, STEAP1, STEAP2, Syk kinase, STEAP1, TROP2, TACI, TDO, T14, TIGIT, TIM3, TLR, TLR2, TLR4, TLRS, TLR9, TMEF1, TNFa, TNFRSF7, Tp55, TREM1, TSLP, TSLPR, TWEAK, VEGF, VISTA, Vstm3, WUCAM, DLL4, TGFbeta, GP100, GPRC5D, CD30 or CD16A; VH2 is a second immunoglobulin heavy chain variable region that specifically binds to A2AR, APRIL, ATPDase, BAFF, BAFFR, BCMA, BlyS, BTK, BTLA, B7DC, B7H1, B7H2, B7H3, B7H4, B7H5, B7H6, B7H7, B7RP1, B7-4, C3, C5, CCL2, CCL3, CCL4, CCL5, CCL7, CCL8, CCL11, CCL15, CCL17, CCL19, CCL20, CCL21, CCL25 CCR3, CCR4, CD3, CD19, CD20, CD24, CD27, CD28, CD38, CD39, CD40, CD40L, CD47, CD52, CD70, CD80, CD86, CD123, CD133, CD137, CD137L, CD160, CD272, CEACAM5, CLEC9, CLEC91, CRTH2, CSF-1, CSF-2, CSF-3, CXCL1, CXCL2, CXCL4, CXCL12, CXCL13, CXCR3, cMet, CTLA4, DLL3, DNGR-1, E-cadherin, EGFR, ENTPD1, EpCAM, FCER1, FCER1A, FCER2, FGFR, FLAP, FOLH1, Gi24, GITR, GITRL, GPR5, HER2, HER3, ICOSL, ICOS, HHLA2, HMGB1, HVEM, IDO, IFNa, IgE, IGF1R, IL2Rbeta, IL1, IL1A, IL1B, IL1F10, IL2, IL4, IL4Ra, IL5, IL5R, IL6, IL7, IL7Ra, IL8, IL9, IL9R, IL10, rhIL10, IL12, IL13, IL13Ra1, IL13Ra2, IL15, IL17, IL17Rb, IL18, IL22, IL23, IL25, IL7, IL33, IL35, ITGB4, ITK, KIR, LAG3, LAMP1, leptin, LPFS2, MHC class II, MUC-1, MUC-16, NCR3LG1, NKG2D, NKp46, NTPDase-1, OX40, OX40L, PD-1, PD-L1, PD-L2, PROM1, S1S2, SIRPalpha, SISP1, SLC, SPG64, ST2, STEAP1, STEAP2, Syk kinase, STEAP1, TROP2, TACI, TDO, T14, TIGIT, TIM3, TLR, TLR2, TLR4, TLR5, TLR9, TMEF1, TNFa, TNFRSF7, Tp55, TREM1, TSLP, TSLPR, TWEAK, VEGF, VISTA, Vstm3, WUCAM, DLL4, TGFbeta, GP100, GPRC5D, CD30 or CD16A; VH3 is a third immunoglobulin heavy chain variable region that specifically binds to A2AR, APRIL, ATPDase, BAFF, BAFFR, BCMA, BlyS, BTK, BTLA, B7DC, B7H1, B7H2, B7H3, B7H4, B7H5, B7H6, B7H7, B7RP1, B7-4, C3, C5, CCL2, CCL3, CCL4, CCLS, CCL7, CCL8, CCL11, CCL15, CCL17, CCL19, CCL20, CCL21, CCL25 CCR3, CCR4, CD3, CD19, CD20, CD24, CD27, CD28, CD38, CD39, CD40, CD40L, CD47, CD52, CD70, CD80, CD86, CD123, CD133, CD137, CD137L, CD160, CD272, CEACAM5, CLEC9, CLEC91, CRTH2, CSF-1, CSF-2, CSF-3, CXCL1, CXCL2, CXCL4, CXCL12, CXCL13, CXCR3, cMet, CTLA4, DLL3, DNGR-1, E-cadherin, EGFR, ENTPD1, EpCAM, FCER1, FCER1A, FCER2, FGFR, FLAP, FOLH1, Gi24, GITR, GITRL, GPR5, HER2, HER3, ICOSL, ICOS, HHLA2, HMGB1, HVEM, IDO, IFNa, IgE, IGF1R, IL2Rbeta, IL1, IL1A, IL1B, IL1F10, IL2, IL4, IL4Ra, IL5, IL5R, IL6, IL7, IL7Ra, IL8, IL9, IL9R, IL10, rhIL10, IL12, IL13, IL13Ra1, IL13Ra2, IL15, IL17, IL17Rb, IL18, IL22, IL23, IL25, IL7, IL33, IL35, ITGB4, ITK, KIR, LAG3, LAMP1, leptin, LPFS2, MHC class II, MUC-1, MUC-16, NCR3LG1, NKG2D, NKp46, NTPDase-1, OX40, OX40L, PD-1, PD-L1, PD-L2, PROM1, S152, SIRPalpha, SISP1, SLC, SPG64, ST2, STEAP1, STEAP2, Syk kinase, STEAP1, TROP2, TACI, TDO, T14, TIGIT, TIM3, TLR, TLR2, TLR4, TLRS, TLR9, TMEF1, TNFa, TNFRSF7, Tp55, TREM1, TSLP, TSLPR, TWEAK, VEGF, VISTA, Vstm3, WUCAM, DLL4, TGFbeta, GP100, GPRC5D, CD30 or CD16A; Fc is a region comprising an immunoglobulin heavy chain constant region 2 (CH2), an immunoglobulin heavy chain constant region 3 (CH3), and optionally, an immunoglobulin hinge; and L1, L2, L3 and L4 are amino acid linkers. In some aspects, the first polypeptide has a structure represented by VL1-VL2-VH2-VH1-Fc; VH1-VH2-VL2-VL1-Fc; VL1-L1-VL2-L2-VH2-L3-VH1-Fc; VH1-L1-VH2-L2-VL2-L3-VL1-Fc; VL1-L1-VL2-L2-VH2-L3-VH1-L4-Fc; or VH1-L1-VH2-L2-VL2-L3-VL1-L4-Fc and the second polypeptide has a structure represented by VL3-VH3-Fc. In some aspects, the first polypeptide has a structure represented by VL1-VL2-VH2-VH1-Fc; VH1-VH2-VL2-VL1-Fc; VL1-L1-VL2-L2-VH2-L3-VH1-Fc; VH1-L1-VH2-L2-VL2-L3-VL1-Fc; VL1-L1-VL2-L2-VH2-L3-VH1-L4-Fc; or VH1-L1-VH2-L2-VL2-L3-VL1-L4-Fc and the second polypeptide has a structure represented by VH3-VL3-Fc. In some aspects, the first polypeptide has a structure represented by VL1-VL2-VH2-VH1-Fc; VH1-VH2-VL2-VL1-Fc; VL1-L1-VL2-L2-VH2-L3-VH1-Fc; VH1-L1-VH2-L2-VL2-L3-VL1-Fc; VL1-L1-VL2-L2-VH2-L3-VH1-L4-Fc; or VH1-L1-VH2-L2-VL2-L3-VL1-L4-Fc and the second polypeptide has a structure represented by VL3-L1-VH3-Fc. In some aspects, the first polypeptide has a structure represented by VL1-VL2-VH2-VH1-Fc; VH1-VH2-VL2-VL1-Fc; VL1-L1-VL2-L2-VH2-L3-VH1-Fc; VH1-L1-VH2-L2-VL2-L3-VL1-Fc; VL1-L1-VL2-L2-VH2-L3-VH1-L4-Fc; or VH1-L1-VH2-L2-VL2-L3-VL1-L4-Fc and the second polypeptide has a structure represented by VH3-L1-VL3-Fc. The VL1, VL2, VL3, VH1, VH2, and/or VH3 may specifically bind to A2AR, APRIL, ATPDase, BAFF, BAFFR, BCMA, BlyS, BTK, BTLA, B7DC, B7H1, B7H2, B7H3, B7H4, B7H5, B7H6, B7H7, B7RP1, B7-4, C3, C5, CCL2, CCL3, CCL4, CCL5, CCL7, CCL8, CCL11, CCL15, CCL17, CCL19, CCL20, CCL21, CCL25 CCR3, CCR4, CD3, CD19, CD20, CD24, CD27, CD28, CD38, CD39, CD40, CD40L, CD47, CD52, CD70, CD80, CD86, CD123, CD133, CD137, CD137L, CD160, CD272, CEACAM5, CLEC9, CLEC91, CRTH2, CSF-1, CSF-2, CSF-3, CXCL1, CXCL2, CXCL4, CXCL12, CXCL13, CXCR3, cMet, CTLA4, DLL3, DNGR-1, E-cadherin, EGFR, ENTPD1, EpCAM, FCER1, FCER1A, FCER2, FGFR, FLAP, FOLH1, Gi24, GITR, GITRL, GPR5, HER2, HER3, ICOSL, ICOS, HHLA2, HMGB1, HVEM, IDO, IFNa, IgE, IGF1R, IL2Rbeta, IL1, IL1A, IL1B, ILF10, IL2, IL4, IL4Ra, IL5, IL5R, IL6, IL7, IL7Ra, IL8, IL9, IL9R, IL10, rhIL10, 1L12, IL13, IL13Ra1, IL13Ra2, IL15, IL17, IL17Rb, IL18, IL22, IL23, IL25, IL7, IL33, IL35, ITGB4, ITK, KIR, LAG3, LAMP1, leptin, LPFS2, MHC class II, MUC-1, MUC-16, NCR3LG1, NKG2D, NKp46, NTPDase-1, OX40, OX40L, PD-1, PD-L1, PD-L2, PROM1, S152, SIRPalpha, SISP1, SLC, SPG64, ST2, STEAP1, STEAP2, Syk kinase, STEAP1, TROP2, TACI, TDO, T14, TIGIT, TIM3, TLR, TLR2, TLR4, TLRS, TLR9, TMEF1, TNFa, TNFRSF7, Tp55, TREM1, TSLP, TSLPR, TWEAK, VEGF, VISTA, Vstm3, WUCAM, DLL4, TGFbeta, GP100, GPRC5D, CD30 or CD16A. For the avoidance of doubt, all the antigen binding polypeptide complex structures described herein can be combined with any one or more of the targets described herein. Any and all disclosure herein in relation to targets for antigen binding polypeptides of the invention is generally applicable, and applies equally and without reservation to each and every antigen binding polypeptide and antigen binding polypeptide complex described herein. For the avoidance of doubt, the VL1, VL2, VL3, VH1, VH2, and/or VH3 of each and every antigen binding polypeptide and antigen binding polypeptide complex described herein may independently bind to any one of said particularly preferred targets.

[0170] In other aspects, the invention is directed to an antigen binding polypeptide complex comprising a first polypeptide and a second polypeptide; wherein the first polypeptide has a structure represented by VL1-VL2-VH2-VH1-CH1; VH1-VH2-VL2-VL1-CH1; VL1-VL2-VH2-VH1-CL; VH1-VH2-VL2-VL1-CL; VL1-VL2-VH2-VH1-CH1-CL; VH1-VH2-VL2-VL1-CH1-CL; VL1-VL2-VH2-VH1-CL-CH1; VH1-VH2-VL2-VL1-CL-CH1; VL1-L1-VL2-L2-VH2-L3-VH1-L4-CH1; VH1-L1-VH2-L2-VL2-L3-VL1-L4-CH1; VL1-L1-VL2-L2-VH2-L3-VH1-L4-CL; VH1-L1-VH2-L2-VL2-L3-VL1-L4-CL; VL1-L1-VL2-L2-VH2-L3-VH1-L4-CH1-L5-CL; VH1-L1-VH2-L2-VL2-L3-VL1-L4-CH1-L5-CL; VL1-L1-VL2-L2-VH2-L3-VH1-L4-CL-L5-CH1; or VH1-L1-VH2-L2-VL2-L3-VL1-L4-CL-L5-CH1; wherein the second polypeptide has a structure represented by VL3-VH3-CH1; VH3-VL3-CH1; VL3-VH3-CL; VH3-VL3-CL; VL3-VH3-CH1-CL; VH3-VL3-CH1-CL; VL3-VH3-CL-CH1; VH3-VL3-CL-CH1; VL3-CL-VH3-CH1; VL3-CH1-VH3-CL; VH3-CH1-VL3-CL; VH3-CL-VL3-CH1; VL3-L6-VH3-L7-CH1; VH3-L6-VL3-L7-CH1; VL3-L6-VH3-L7-CL; VH3-L6-VL3-L7-CL; VL3-L6-VH3-L7-CH1-L8-CL; VH3-L6-VL3-L7-CH1-L8-CL; VL3-L6-VH3-L7-CL-L8-CH1; VH3-L6-VL3-L7-CL-L8-CH1; VL3-L6-CL-L7-VH3-L8-CH1; VL3-L6-CH1-L7-VH3-L8-CL; VH3-L6-CH1-L7-VL3-L8-CL; VH3-L6-CL-L7-VL3-L8-CH1; VL3-VH3-L6-CH1-CL; VH3-VL3-L6-CH1-CL; VL3-VH3-L6-CL-CH1; VH3-VL3-L6-CL-CH1; VL3-CL-L6-VH3-CH1; VL3-CH1-L6-VH3-CL; VH3-CH1-L6-VL3-CL; or VH3-CL-L6-VL3-CH1; wherein VL1 is a first immunoglobulin light chain variable region that specifically binds to A2AR, APRIL, ATPDase, BAFF, BAFFR, BCMA, BlyS, BTK, BTLA, B7DC, B7H1, B7H2, B7H3, B7H4, B7H5, B7H6, B7H7, B7RP1, B7-4, C3, C5, CCL2, CCL3, CCL4, CCL5, CCL7, CCL8, CCL11, CCL15, CCL17, CCL19, CCL20, CCL21, CCL25 CCR3, CCR4, CD3, CD19, CD20, CD24, CD27, CD28, CD38, CD39, CD40, CD40L, CD47, CD52, CD70, CD80, CD86, CD123, CD133, CD137, CD137L, CD160, CD272, CEACAM5, CLEC9, CLEC91, CRTH2, CSF-1, CSF-2, CSF-3, CXCL1, CXCL2, CXCL4, CXCL12, CXCL13, CXCR3, cMet, CTLA4, DLL3, DNGR-1, E-cadherin, EGFR, ENTPD1, EpCAM, FCER1, FCER1A, FCER2, FGFR, FLAP, FOLH1, Gi24, GITR, GITRL, GPR5, HER2, HER3, ICOSL, ICOS, HHLA2, HMGB1, HVEM, IDO, IFNa, IgE, IGF1R, IL2Rbeta, IL1, IL1A, IL1B, ILF10, IL2, IL4, IL4Ra, IL5, IL5R, IL6, IL7, IL7Ra, IL8, IL9, IL9R, IL10, rhIL10, IR12, IL13, IL13Ra1, IL13Ra2, IL15, IL17, IL17Rb, IL18, IL22, IL23, IL25, IL7, IL33, IL35, ITGB4, ITK, KIR, LAG3, LAMP1, leptin, LPFS2, MHC class II, MUC-1, MUC-16, NCR3LG1, NKG2D, NKp46, NTPDase-1, OX40, OX40L, PD-1, PD-L1, PD-L2, PROM1, S1S2, SIRPalpha, SISP1, SLC, SPG64, ST2, STEAP1, STEAP2, Syk kinase, STEAP1, TROP2, TACI, TDO, T14, TIGIT, TIM3, TLR, TLR2, TLR4, TLR5, TLR9, TMEF1, TNFa, TNFRSF7, Tp55, TREM1, TSLP, TSLPR, TWEAK, VEGF, VISTA, Vstm3, WUCAM, DLL4, TGFbeta, GP100, GPRC5D, CD30 or CD16A; VL2 is a second immunoglobulin light chain variable region that specifically binds to A2AR, APRIL, ATPDase, BAIT, BAFFR, BCMA, BlyS, BTK, BTLA, B7DC, B7H1, B7H2, B7B3, B7B4, B7H5, B7H6, B7H7, B7RP1, B7-4, C3, C5, CCL2, CCL3, CCL4, CCL5, CCL7, CCL8, CCL11, CCL15, CCL17, CCL19, CCL20, CCL21, CCL25 CCR3, CCR4, CD3, CD19, CD20, CD24, CD27, CD28, CD38, CD39, CD40, CD40L, CD47, CD52, CD70, CD80, CD86, CD123, CD133, CD137, CD137L, CD160, CD272, CEACAM5, CLEC9, CLEC91, CRTH2, CSF-1, CSF-2, CSF-3, CXCL1, CXCL2, CXCL4, CXCL12, CXCL13, CXCR3, cMet, CTLA4, DLL3, DNGR-1, E-cadherin, EGFR, ENTPD1, EpCAM, FCER1, FCER1A, FCER2, FGFR, FLAP, FOLH1, Gi24, GITR, GITRL, GPR5, HER2, HER3, ICOSL, ICOS, HHLA2, HMGB1, HVEM, IDO, IFNa, IgE, IGF1R, IL2Rbeta, IL1, IL1A, IL1B, IL1F10, IL2, IL4, IL4Ra, IL5, IL5R, IL6, IL7, IL7Ra, IL8, IL9, IL9R, IL10, rhIL10, IL12, IL13, R13Ra1, IL13Ra2, IL15, IL17, IL17Rb, IL18, IL22, IL23, IL25, IL7, IL33, IL35, ITGB4, ITK, KIR, LAG3, LAMP1, leptin, LPFS2, MHC class II, MUC-1, MUC-16, NCR3LG1, NKG2D, NKp46, NTPDase-1, OX40, OX40L, PD-1, PD-L1, PD-L2, PROM1, S152, SIRPalpha, SISP1, SLC, SPG64, ST2, STEAP1, STEAP2, Syk kinase, STEAP1, TROP2, TACI, TDO, T14, TIGIT, TIM3, TLR, TLR2, TLR4, TLR5, TLR9, TMEF1, TNFa, TNFRSF7, Tp55, TREM1, TSLP, TSLPR, TWEAK, VEGF, VISTA, Vstm3, WUCAM, DLL4, TGFbeta, GP100, GPRC5D, CD30 or CD16A; VL3 is a third immunoglobulin light chain variable region that specifically binds to A2AR, APRIL, ATPDase, BAFF, BAFFR, BCMA, BlyS, BTK, BTLA, B7DC, B7B1, B7B2, B7H3, B7H4, B7H5, B7H6, B7H7, B7RP1, B7-4, C3, C5, CCL2, CCL3, CCL4, CCL5, CCL7, CCL8, CCL11, CCL15, CCL17, CCL19, CCL20, CCL21, CCL25 CCR3, CCR4, CD3, CD19, CD20, CD24, CD27, CD28, CD38, CD39, CD40, CD40L, CD47, CD52, CD70, CD80, CD86, CD123, CD133, CD137, CD137L, CD160, CD272, CEACAM5, CLEC9, CLEC91, CRTH2, CSF-1, CSF-2, CSF-3, CXCL1, CXCL2, CXCL4, CXCL12, CXCL13, CXCR3, cMet, CTLA4, DLL3, DNGR-1, E-cadherin, EGFR, ENTPD1, EpCAM, FCER1, FCER1A, FCER2, FGFR, FLAP, FOLH1, Gi24, GITR, GITRL, GPR5, HER2, HER3, ICOSL, ICOS, HHLA2, HMGB1, HVEM, IDO, IFNa, IgE, IGF1R, IL2Rbeta, IL1, IL1A, IL1B, IL1F10, IL2, IL4, IL4Ra, IL5, IL5R, IL6, IL7, IL7Ra, IL8, IL9, IL9R, IL10, rhIL10, IL12, IL13, IL13Ra1, IL13Ra2, IL15, I17, IL17Rb, IL18, IR22, IL23, IL25, IL7, IL33, IL35, ITGB4, ITK, KIR, LAG3, LAMP1, leptin, LPFS2, MHC class II, MUC-1, MUC-16, NCR3LG1, NKG2D, NKp46, NTPDase-1, OX40, OX40L, PD-1, PD-L1, PD-L2, PROM1, S1S2, SIRPalpha, SISP1, SLC, SPG64, ST2, STEAP1, STEAP2, Syk kinase, STEAP1, TROP2, TACI, TDO, T14, TIGIT, TIM3, TLR, TLR2, TLR4, TLR5, TLR9, TMEF1, TNFa, TNFRSF7, Tp55, TREM1, TSLP, TSLPR, TWEAK, VEGF, VISTA, Vstm3, WUCAM, DLL4, TGFbeta, GP100, GPRC5D, CD30 or CD16A; VH1 is a first immunoglobulin heavy chain variable region that specifically binds to A2AR, APRIL, ATPDase, BAFF, BAFFR, BCMA, BlyS, BTK, BTLA, B7DC, B7H1, B7H2, B7H3, B7H4, B7H5, B7H6, B7H7, B7RP1, B7-4, C3, C5, CCL2, CCL3, CCL4, CCL5, CCL7, CCL8, CCL11, CCL15, CCL17, CCL19, CCL20, CCL21, CCL25 CCR3, CCR4, CD3, CD19, CD20, CD24, CD27, CD28, CD38, CD39, CD40, CD40L, CD47, CD52, CD70, CD80, CD86, CD123, CD133, CD137, CD137L, CD160, CD272, CEACAM5, CLEC9, CLEC91, CRTH2, CSF-1, CSF-2, CSF-3, CXCL1, CXCL2, CXCL4, CXCL12, CXCL13, CXCR3, cMet, CTLA4, DLL3, DNGR-1, E-cadherin, EGFR, ENTPD1, EpCAM, FCER1, FCER1A, FCER2, FGFR, FLAP, FOLH1, Gi24, GITR, GITRL, GPR5, HER2, HER3, ICOSL, ICOS, HHLA2, HMGB1, HVEM, IDO, IFNa, IgE, IGF1R, IL2Rbeta, IL1, IL1A, IL1B, IL1F10, IL2, IL4, IL4Ra, IL5, IL5R, IL6, IL7, IL7Ra, IL8, IL9, IL9R, IL10, rhIL10, IL12, IL13, IL13Ra1, IL13Ra2, IL15, IL17, IL17Rb, IL18, IL22, IL23, IL25, IL7, IL33, IL35, ITGB4, ITK, KIR, LAG3, LAMP1, leptin, LPFS2, MHC class II, MUC-1, MUC-16, NCR3LG1, NKG2D, NKp46, NTPDase-1, OX40, OX40L, PD-1, PD-L1, PD-L2, PROM1, S152, SIRPalpha, SISP1, SLC, SPG64, ST2, STEAP1, STEAP2, Syk kinase, STEAP1, TROP2, TACI, TDO, T14, TIGIT, TIM3, TLR, TLR2, TLR4, TLR5, TLR9, TMEF1, TNFa, TNFRSF7, Tp55, TREM1, TSLP, TSLPR, TWEAK, VEGF, VISTA, Vstm3, WUCAM, DLL4, TGFbeta, GP100, GPRC5D, CD30 or CD16A; VH2 is a second immunoglobulin heavy chain variable region that specifically binds to A2AR, APRIL, ATPDase, BAFF, BAFFR, BCMA, BlyS, BTK, BTLA, B7DC, B7H1, B7H2, B7H3, B7H4, B7H5, B7H6, B7H7, B7RP1, B7-4, C3, C5, CCL2, CCL3, CCL4, CCL5, CCL7, CCL8, CCL11, CCL15, CCL17, CCL19, CCL20, CCL21, CCL25 CCR3, CCR4, CD3, CD19, CD20, CD24, CD27, CD28, CD38, CD39, CD40, CD40L, CD47, CD52, CD70, CD80, CD86, CD123, CD133, CD137, CD137L, CD160, CD272, CEACAM5, CLEC9, CLEC91, CRTH2, CSF-1, CSF-2, CSF-3, CXCL1, CXCL2, CXCL4, CXCL12, CXCL13, CXCR3, cMet, CTLA4, DLL3, DNGR-1, E-cadherin, EGFR, ENTPD1, EpCAM, FCER1, FCER1A, FCER2, FGFR, FLAP, FOLH1, Gi24, GITR, GITRL, GPR5, HER2, HER3, ICOSL, ICOS, HHLA2, HMGB1, HVEM, IDO, IFNa, IgE, IGF1R, IL2Rbeta, IL1, IL1A, IL1B, IL1F10, IL2, IL4, IL4Ra, IL5, IL5R, IL6, IL7, IL7Ra, IL8, IL9, IL9R, IL10, rhIL10, IL12, IL13, IL13Ra1, IL13Ra2, IL15, IL17, IL17Rb, IL18, IL22, IL23, IL25, IL7, IL33, IL35, ITGB4, ITK, KIR, LAG3, LAMP1, leptin, LPFS2, MHC class II, MUC-1, MUC-16, NCR3LG1, NKG2D, NKp46, NTPDase-1, OX40, OX40L, PD-1, PD-L1, PD-L2, PROM1, S152, SIRPalpha, SISP1, SLC, SPG64, ST2, STEAP1, STEAP2, Syk kinase, STEAP1, TROP2, TACI, TDO, T14, TIGIT, TIM3, TLR, TLR2, TLR4, TLR5, TLR9, TMEF1, TNFa, TNFRSF7, Tp55, TREM1, TSLP, TSLPR, TWEAK, VEGF, VISTA, Vstm3, WUCAM, DLL4, TGFbeta, GP100, GPRC5D, CD30 or CD16A; VH3 is a third immunoglobulin heavy chain variable region that specifically binds to A2AR, APRIL, ATPDase, BAFF, BAFFR, BCMA, BlyS, BTK, BTLA, B7DC, B7H1, B7H2, B7H3, B7H4, B7H5, B7H6, B7H7, B7RP1, B7-4, C3, C5, CCL2, CCL3, CCL4, CCL5, CCL7, CCL8, CCL11, CCL15, CCL17, CCL19, CCL20, CCL21, CCL25 CCR3, CCR4, CD3, CD19, CD20, CD24, CD27, CD28, CD38, CD39, CD40, CD40L, CD47, CD52, CD70, CD80, CD86, CD123, CD133, CD137, CD137L, CD160, CD272, CEACAM5, CLEC9, CLEC91, CRTH2, CSF-1, CSF-2, CSF-3, CXCL1, CXCL2, CXCL4, CXCL12, CXCL13, CXCR3, cMet, CTLA4, DLL3, DNGR-1, E-cadherin, EGFR, ENTPD1, EpCAM, FCER1, FCER1A, FCER2, FGFR, FLAP, FOLH1, Gi24, GITR, GITRL, GPR5, HER2, HER3, ICOSL, ICOS, HHLA2, HMGB1, HVEM, IDO, IFNa, IgE, IGF1R, IL2Rbeta, IL1, IL1A, IL1B, IL1F10, IL2, IL4, IL4Ra, IL5, IL5R, IL6, IL7, IL7Ra, IL8, I9, IL9R, IL10, rhIL10, IL12, IL13, IL13Ra1, IL13Ra2, IL15, IL17, IL17Rb, IL18, IL22, IL23, IL25, IL7, IL33, IL35, ITGB4, ITK, KIR, LAG3, LAMP1, leptin, LPFS2, MHC class II, MUC-1, MUC-16, NCR3LG1, NKG2D, NKp46, NTPDase-1, OX40, OX40L, PD-1, PD-L1, PD-L2, PROM1, S152, SIRPalpha, SISP1, SLC, SPG64, ST2, STEAP1, STEAP2, Syk kinase, STEAP1, TROP2, TACI, TDO, T14, TIGIT, TIM3, TLR, TLR2, TLR4, TLR5, TLR9, TMEF1, TNFa, TNFRSF7, Tp55, TREM1, TSLP, TSLPR, TWEAK, VEGF, VISTA, Vstm3, WUCAM, DLL4, TGFbeta, GP100, GPRC5D, CD30 or CD16A; CH1 is an immunoglobulin heavy chain constant region 1; CL is an immunoglobulin light chain constant region; and L1, L2, L3, L4, L5, L6, L7 and L8 are amino acid linkers. In some aspects, the first polypeptide has a structure represented by VL1-VL2-VH2-VH1-CH1 and the second polypeptide has a structure represented by VL3-VH3-CH1; VH3-VL3-CH1; VL3-VH3-CL; VH3-VL3-CL; VL3-VH3-CH1-CL; VH3-VL3-CH1-CL; VL3-VH3-CL-CH1; VH3-VL3-CL-CH1; VL3-CL-VH3-CH1; VL3-CH1-VH3-CL; VH3-CH1-VL3-CL; VH3-CL-VL3-CH1; VL3-L6-VH3-L7-CH1; VH3-L6-VL3-L7-CH1; VL3-L6-VH3-L7-CL; VH3-L6-VL3-L7-CL; VL3-L6-VH3-L7-CH1-L8-CL; VH3-L6-VL3-L7-CH1-L8-CL; VL3-L6-VH3-L7-CL-L8-CH1; VH3-L6-VL3-L7-CL-L8-CH1; VL3-L6-CL-L7-VH3-L8-CH1; VL3-L6-CH1-L7-VH3-L8-CL; VH3-L6-CH1-L7-VL3-L8-CL; VH3-L6-CL-L7-VL3-L8-CH1; VL3-VH3-L6-CH1-CL; VH3-VL3-L6-CH1-CL; VL3-VH3-L6-CL-CH1; VH3-VL3-L6-CL-CH1; VL3-CL-L6-VH3-CH1; VL3-CH1-L6-VH3-CL; VH3-CH1-L6-VL3-CL; or VH3-CL-L6-VL3-CH1. In some aspects, the first polypeptide has a structure represented by VH1-VH2-VL2-VL1-CH1 and the second polypeptide has a structure represented by VL3-VH3-CH1; VH3-VL3-CH1; VL3-VH3-CL; VH3-VL3-CL; VL3-VH3-CH1-CL; VH3-VL3-CH1-CL; VL3-VH3-CL-CH1; VH3-VL3-CL-CH1; VL3-CL-VH3-CH1; VL3-CH1-VH3-CL; VH3-CH1-VL3-CL; VH3-CL-VL3-CH1; VL3-L6-VH3-L7-CH1; VH3-L6-VL3-L7-CH1; VL3-L6-VH3-L7-CL; VH3-L6-VL3-L7-CL; VL3-L6-VH3-L7-CH1-L8-CL; VH3-L6-VL3-L7-CH1-L8-CL; VL3-L6-VH3-L7-CL-L8-CH1; VH3-L6-VL3-L7-CL-L8-CH1; VL3-L6-CL-L7-VH3-L8-CH1; VL3-L6-CH1-L7-VH3-L8-CL; VH3-L6-CH1-L7-VL3-L8-CL; VH3-L6-CL-L7-VL3-L8-CH1; VL3-VH3-L6-CH1-CL; VH3-VL3-L6-CH1-CL; VL3-VH3-L6-CL-CH1; VH3-VL3-L6-CL-CH1; VL3-CL-L6-VH3-CH1; VL3-CH1-L6-VH3-CL; VH3-CH1-L6-VL3-CL; or VH3-CL-L6-VL3-CH1. In some aspects, the first polypeptide has a structure represented by VL1-VL2-VH2-VH1-CL and the second polypeptide has a structure represented by VL3-VH3-CH1; VH3-VL3-CH1; VL3-VH3-CL; VH3-VL3-CL; VL3-VH3-CH1-CL; VH3-VL3-CH1-CL; VL3-VH3-CL-CH1; VH3-VL3-CL-CH1; VL3-CL-VH3-CH1; VL3-CH1-VH3-CL; VH3-CH1-VL3-CL; VH3-CL-VL3-CH1; VL3-L6-VH3-L7-CH1; VH3-L6-VL3-L7-CH1; VL3-L6-VH3-L7-CL; VH3-L6-VL3-L7-CL; VL3-L6-VH3-L7-CH1-L8-CL; VH3-L6-VL3-L7-CH1-L8-CL; VL3-L6-VH3-L7-CL-L8-CH1; VH3-L6-VL3-L7-CL-L8-CH1; VL3-L6-CL-L7-VH3-L8-CH1; VL3-L6-CH1-L7-VH3-L8-CL; VH3-L6-CH1-L7-VL3-L8-CL; VH3-L6-CL-L7-VL3-L8-CH1; VL3-VH3-L6-CH1-CL; VH3-VL3-L6-CH1-CL; VL3-VH3-L6-CL-CH1; VH3-VL3-L6-CL-CH1; VL3-CL-L6-VH3-CH1; VL3-CH1-L6-VH3-CL; VH3-CH1-L6-VL3-CL; or VH3-CL-L6-VL3-CH1. In some aspects, the first polypeptide has a structure represented by VH1-VH2-VL2-VL1-CL and the second polypeptide has a structure represented by VL3-VH3-CH1; VH3-VL3-CH1; VL3-VH3-CL; VH3-VL3-CL; VL3-VH3-CH1-CL; VH3-VL3-CH1-CL; VL3-VH3-CL-CH1; VH3-VL3-CL-CH1; VL3-CL-VH3-CH1; VL3-CH1-VH3-CL; VH3-CH1-VL3-CL; VH3-CL-VL3-CH1; VL3-L6-VH3-L7-CH1; VH3-L6-VL3-L7-CH1; VL3-L6-VH3-L7-CL; VH3-L6-VL3-L7-CL; VL3-L6-VH3-L7-CH1-L8-CL; VH3-L6-VL3-L7-CH1-L8-CL; VL3-L6-VH3-L7-CL-L8-CH1; VH3-L6-VL3-L7-CL-L8-CH1; VL3-L6-CL-L7-VH3-L8-CH1; VL3-L6-CH1-L7-VH3-L8-CL; VH3-L6-CH1-L7-VL3-L8-CL; VH3-L6-CL-L7-VL3-L8-CH1; VL3-VH3-L6-CH1-CL; VH3-VL3-L6-CH1-CL; VL3-VH3-L6-CL-CH1; VH3-VL3-L6-CL-CH1; VL3-CL-L6-VH3-CH1; VL3-CH1-L6-VH3-CL; VH3-CH1-L6-VL3-CL; or VH3-CL-L6-VL3-CH1. In some aspects, the first polypeptide has a structure represented by VL1-VL2-VH2-VH1-CH1-CL and the second polypeptide has a structure represented by VL3-VH3-CH1; VH3-VL3-CH1; VL3-VH3-CL; VH3-VL3-CL; VL3-VH3-CH1-CL; VH3-VL3-CH1-CL; VL3-VH3-CL-CH1; VH3-VL3-CL-CH1; VL3-CL-VH3-CH1; VL3-CH1-VH3-CL; VH3-CH1-VL3-CL; VH3-CL-VL3-CH1; VL3-L6-VH3-L7-CH1; VH3-L6-VL3-L7-CH1; VL3-L6-VH3-L7-CL; VH3-L6-VL3-L7-CL; VL3-L6-VH3-L7-CH1-L8-CL; VH3-L6-VL3-L7-CH1-L8-CL; VL3-L6-VH3-L7-CL-L8-CH1; VH3-L6-VL3-L7-CL-L8-CH1; VL3-L6-CL-L7-VH3-L8-CH1; VL3-L6-CH1-L7-VH3-L8-CL; VH3-L6-CH1-L7-VL3-L8-CL; VH3-L6-CL-L7-VL3-L8-CH1; VL3-VH3-L6-CH1-CL; VH3-VL3-L6-CH1-CL; VL3-VH3-L6-CL-CH1; VH3-VL3-L6-CL-CH1; VL3-CL-L6-VH3-CH1; VL3-CH1-L6-VH3-CL; VH3-CH1-L6-VL3-CL; or VH3-CL-L6-VL3-CH1. In some aspects, the first polypeptide has a structure represented by VH1-VH2-VL2-VL1-CH1-CL and the second polypeptide has a structure represented by VL3-VH3-CH1; VH3-VL3-CH1; VL3-VH3-CL; VH3-VL3-CL; VL3-VH3-CH1-CL; VH3-VL3-CH1-CL; VL3-VH3-CL-CH1; VH3-VL3-CL-CH1; VL3-CL-VH3-CH1; VL3-CH1-VH3-CL; VH3-CH1-VL3-CL; VH3-CL-VL3-CH1; VL3-L6-VH3-L7-CH1; VH3-L6-VL3-L7-CH1; VL3-L6-VH3-L7-CL; VH3-L6-VL3-L7-CL; VL3-L6-VH3-L7-CH1-L8-CL; VH3-L6-VL3-L7-CH1-L8-CL; VL3-L6-VH3-L7-CL-L8-CH1; VH3-L6-VL3-L7-CL-L8-CH1; VL3-L6-CL-L7-VH3-L8-CH1; VL3-L6-CH1-L7-VH3-L8-CL; VH3-L6-CH1-L7-VL3-L8-CL; VH3-L6-CL-L7-VL3-L8-CH1; VL3-VH3-L6-CH1-CL; VH3-VL3-L6-CH1-CL; VL3-VH3-L6-CL-CH1; VH3-VL3-L6-CL-CH1; VL3-CL-L6-VH3-CH1; VL3-CH1-L6-VH3-CL; VH3-CH1-L6-VL3-CL; or VH3-CL-L6-VL3-CH1. In some aspects, the first polypeptide has a structure represented by VL1-VL2-VH2-VH1-CL-CH1 and the second polypeptide has a structure represented by VL3-VH3-CH1; VH3-VL3-CH1; VL3-VH3-CL; VH3-VL3-CL; VL3-VH3-CH1-CL; VH3-VL3-CH1-CL; VL3-VH3-CL-CH1; VH3-VL3-CL-CH1; VL3-CL-VH3-CH1; VL3-CH1-VH3-CL; VH3-CH1-VL3-CL; VH3-CL-VL3-CH1; VL3-L6-VH3-L7-CH1; VH3-L6-VL3-L7-CH1; VL3-L6-VH3-L7-CL; VH3-L6-VL3-L7-CL; VL3-L6-VH3-L7-CH1-L8-CL; VH3-L6-VL3-L7-CH1-L8-CL; VL3-L6-VH3-L7-CL-L8-CH1; VH3-L6-VL3-L7-CL-L8-CH1; VL3-L6-CL-L7-VH3-L8-CH1; VL3-L6-CH1-L7-VH3-L8-CL; VH3-L6-CH1-L7-VL3-L8-CL; VH3-L6-CL-L7-VL3-L8-CH1; VL3-VH3-L6-CH1-CL; VH3-VL3-L6-CH1-CL; VL3-VH3-L6-CL-CH1; VH3-VL3-L6-CL-CH1; VL3-CL-L6-VH3-CH1; VL3-CH1-L6-VH3-CL; VH3-CH1-L6-VL3-CL; or VH3-CL-L6-VL3-CH1. In some aspects, the first polypeptide has a structure represented by VH1-VH2-VL2-VL1-CL-CH1 and the second polypeptide has a structure represented by VL3-VH3-CH1; VH3-VL3-CH1; VL3-VH3-CL; VH3-VL3-CL; VL3-VH3-CH1-CL; VH3-VL3-CH1-CL; VL3-VH3-CL-CH1; VH3-VL3-CL-CH1; VL3-CL-VH3-CH1; VL3-CH1-VH3-CL; VH3-CH1-VL3-CL; VH3-CL-VL3-CH1; VL3-L6-VH3-L7-CH1; VH3-L6-VL3-L7-CH1; VL3-L6-VH3-L7-CL; VH3-L6-VL3-L7-CL; VL3-L6-VH3-L7-CH1-L8-CL; VH3-L6-VL3-L7-CH1-L8-CL; VL3-L6-VH3-L7-CL-L8-CH1; VH3-L6-VL3-L7-CL-L8-CH1; VL3-L6-CL-L7-VH3-L8-CH1; VL3-L6-CH1-L7-VH3-L8-CL; VH3-L6-CH1-L7-VL3-L8-CL; VH3-L6-CL-L7-VL3-L8-CH1; VL3-VH3-L6-CH1-CL; VH3-VL3-L6-CH1-CL; VL3-VH3-L6-CL-CH1; VH3-VL3-L6-CL-CH1; VL3-CL-L6-VH3-CH1; VL3-CH1-L6-VH3-CL; VH3-CH1-L6-VL3-CL; or VH3-CL-L6-VL3-CH1. In some aspects, the first polypeptide has a structure represented by VL1-L1-VL2-L2-VH2-L3-VH1-L4-CH1 and the second polypeptide has a structure represented by VL3-VH3-CH1; VH3-VL3-CH1; VL3-VH3-CL; VH3-VL3-CL; VL3-VH3-CH1-CL; VH3-VL3-CH1-CL; VL3-VH3-CL-CH1; VH3-VL3-CL-CH1; VL3-CL-VH3-CH1; VL3-CH1-VH3-CL; VH3-CH1-VL3-CL; VH3-CL-VL3-CH1; VL3-L6-VH3-L7-CH1; VH3-L6-VL3-L7-CH1; VL3-L6-VH3-L7-CL; VH3-L6-VL3-L7-CL; VL3-L6-VH3-L7-CH1-L8-CL; VH3-L6-VL3-L7-CH1-L8-CL; VL3-L6-VH3-L7-CL-L8-CH1; VH3-L6-VL3-L7-CL-L8-CH1; VL3-L6-CL-L7-VH3-L8-CH1; VL3-L6-CH1-L7-VH3-L8-CL; VH3-L6-CH1-L7-VL3-L8-CL; VH3-L6-CL-L7-VL3-L8-CH1; VL3-VH3-L6-CH1-CL; VH3-VL3-L6-CH1-CL; VL3-VH3-L6-CL-CH1; VH3-VL3-L6-CL-CH1; VL3-CL-L6-VH3-CH1; VL3-CH1-L6-VH3-CL; VH3-CH1-L6-VL3-CL; or VH3-CL-L6-VL3-CH1. In some aspects, the first polypeptide has a structure represented by VH1-L1-VH2-L2-VL2-L3-VL1-L4-CH1 and the second polypeptide has a structure represented by VL3-VH3-CH1; VH3-VL3-CH1; VL3-VH3-CL; VH3-VL3-CL; VL3-VH3-CH1-CL; VH3-VL3-CH1-CL; VL3-VH3-CL-CH1; VH3-VL3-CL-CH1; VL3-CL-VH3-CH1; VL3-CH1-VH3-CL; VH3-CH1-VL3-CL; VH3-CL-VL3-CH1; VL3-L6-VH3-L7-CH1; VH3-L6-VL3-L7-CH1; VL3-L6-VH3-L7-CL; VH3-L6-VL3-L7-CL; VL3-L6-VH3-L7-CH1-L8-CL; VH3-L6-VL3-L7-CH1-L8-CL; VL3-L6-VH3-L7-CL-L8-CH1; VH3-L6-VL3-L7-CL-L8-CH1; VL3-L6-CL-L7-VH3-L8-CH1; VL3-L6-CH1-L7-VH3-L8-CL; VH3-L6-CH1-L7-VL3-L8-CL; VH3-L6-CL-L7-VL3-L8-CH1; VL3-VH3-L6-CH1-CL; VH3-VL3-L6-CH1-CL; VL3-VH3-L6-CL-CH1; VH3-VL3-L6-CL-CH1; VL3-CL-L6-VH3-CH1; VL3-CH1-L6-VH3-CL; VH3-CH1-L6-VL3-CL; or VH3-CL-L6-VL3-CH1. In some aspects, the first polypeptide has a structure represented by VL1-L1-VL2-L2-VH2-L3-VH1-L4-CL and the second polypeptide has a structure represented by VL3-VH3-CH1; VH3-VL3-CH1; VL3-VH3-CL; VH3-VL3-CL; VL3-VH3-CH1-CL; VH3-VL3-CH1-CL; VL3-VH3-CL-CH1; VH3-VL3-CL-CH1; VL3-CL-VH3-CH1; VL3-CH1-VH3-CL; VH3-CH1-VL3-CL; VH3-CL-VL3-CH1; VL3-L6-VH3-L7-CH1; VH3-L6-VL3-L7-CH1; VL3-L6-VH3-L7-CL; VH3-L6-VL3-L7-CL; VL3-L6-VH3-L7-CH1-L8-CL; VH3-L6-VL3-L7-CH1-L8-CL; VL3-L6-VH3-L7-CL-L8-CH1; VH3-L6-VL3-L7-CL-L8-CH1; VL3-L6-CL-L7-VH3-L8-CH1; VL3-L6-CH1-L7-VH3-L8-CL; VH3-L6-CH1-L7-VL3-L8-CL; VH3-L6-CL-L7-VL3-L8-CH1; VL3-VH3-L6-CH1-CL; VH3-VL3-L6-CH1-CL; VL3-VH3-L6-CL-CH1; VH3-VL3-L6-CL-CH1; VL3-CL-L6-VH3-CH1; VL3-CH1-L6-VH3-CL; VH3-CH1-L6-VL3-CL; or VH3-CL-L6-VL3-CH1. In some aspects, the first polypeptide has a structure represented by VH1-L1-VH2-L2-VL2-L3-VL1-L4-CL and the second polypeptide has a structure represented by VL3-VH3-CH1; VH3-VL3-CH1; VL3-VH3-CL; VH3-VL3-CL; VL3-VH3-CH1-CL; VH3-VL3-CH1-CL; VL3-VH3-CL-CH1; VH3-VL3-CL-CH1; VL3-CL-VH3-CH1; VL3-CH1-VH3-CL; VH3-CH1-VL3-CL; VH3-CL-VL3-CH1; VL3-L6-VH3-L7-CH1; VH3-L6-VL3-L7-CH1; VL3-L6-VH3-L7-CL; VH3-L6-VL3-L7-CL; VL3-L6-VH3-L7-CH1-L8-CL; VH3-L6-VL3-L7-CH1-L8-CL; VL3-L6-VH3-L7-CL-L8-CH1; VH3-L6-VL3-L7-CL-L8-CH1; VL3-L6-CL-L7-VH3-L8-CH1; VL3-L6-CH1-L7-VH3-L8-CL; VH3-L6-CH1-L7-VL3-L8-CL; VH3-L6-CL-L7-VL3-L8-CH1; VL3-VH3-L6-CH1-CL; VH3-VL3-L6-CH1-CL; VL3-VH3-L6-CL-CH1; VH3-VL3-L6-CL-CH1; VL3-CL-L6-VH3-CH1; VL3-CH1-L6-VH3-CL; VH3-CH1-L6-VL3-CL; or VH3-CL-L6-VL3-CH1. In some aspects, the first polypeptide has a structure represented by VL1-L1-VL2-L2-VH2-L3-VH1-L4-CH1-L5-CL and the second polypeptide has a structure represented by VL3-VH3-CH1; VH3-VL3-CH1; VL3-VH3-CL; VH3-VL3-CL; VL3-VH3-CH1-CL; VH3-VL3-CH1-CL; VL3-VH3-CL-CH1; VH3-VL3-CL-CH1; VL3-CL-VH3-CH1; VL3-CH1-VH3-CL; VH3-CH1-VL3-CL; VH3-CL-VL3-CH1; VL3-L6-VH3-L7-CH1; VH3-L6-VL3-L7-CH1; VL3-L6-VH3-L7-CL; VH3-L6-VL3-L7-CL; VL3-L6-VH3-L7-CH1-L8-CL; VH3-L6-VL3-L7-CH1-L8-CL; VL3-L6-VH3-L7-CL-L8-CH1; VH3-L6-VL3-L7-CL-L8-CH1; VL3-L6-CL-L7-VH3-L8-CH1; VL3-L6-CH1-L7-VH3-L8-CL; VH3-L6-CH1-L7-VL3-L8-CL; VH3-L6-CL-L7-VL3-L8-CH1; VL3-VH3-L6-CH1-CL; VH3-VL3-L6-CH1-CL; VL3-VH3-L6-CL-CH1; VH3-VL3-L6-CL-CH1; VL3-CL-L6-VH3-CH1; VL3-CH1-L6-VH3-CL; VH3-CH1-L6-VL3-CL; or VH3-CL-L6-VL3-CH1. In some aspects, the first polypeptide has a structure represented by VH1-L1-VH2-L2-VL2-L3-VL1-L4-CH1-L5-CL and the second polypeptide has a structure represented by VL3-VH3-CH1; VH3-VL3-CH1; VL3-VH3-CL; VH3-VL3-CL; VL3-VH3-CH1-CL; VH3-VL3-CH1-CL; VL3-VH3-CL-CH1; VH3-VL3-CL-CH1; VL3-CL-VH3-CH1; VL3-CH1-VH3-CL; VH3-CH1-VL3-CL; VH3-CL-VL3-CH1; VL3-L6-VH3-L7-CH1; VH3-L6-VL3-L7-CH1; VL3-L6-VH3-L7-CL; VH3-L6-VL3-L7-CL; VL3-L6-VH3-L7-CH1-L8-CL; VH3-L6-VL3-L7-CH1-L8-CL; VL3-L6-VH3-L7-CL-L8-CH1; VH3-L6-VL3-L7-CL-L8-CH1; VL3-L6-CL-L7-VH3-L8-CH1; VL3-L6-CH1-L7-VH3-L8-CL; VH3-L6-CH1-L7-VL3-L8-CL; VH3-L6-CL-L7-VL3-L8-CH1; VL3-VH3-L6-CH1-CL; VH3-VL3-L6-CH1-CL; VL3-VH3-L6-CL-CH1; VH3-VL3-L6-CL-CH1; VL3-CL-L6-VH3-CH1; VL3-CH1-L6-VH3-CL; VH3-CH1-L6-VL3-CL; or VH3-CL-L6-VL3-CH1. In some aspects, the first polypeptide has a structure represented by VL1-L1-VL2-L2-VH2-L3-VH1-L4-CL-L5-CH1 and the second polypeptide has a structure represented by VL3-VH3-CH1; VH3-VL3-CH1; VL3-VH3-CL; VH3-VL3-CL; VL3-VH3-CH1-CL; VH3-VL3-CH1-CL; VL3-VH3-CL-CH1; VH3-VL3-CL-CH1; VL3-CL-VH3-CH1; VL3-CH1-VH3-CL; VH3-CH1-VL3-CL; VH3-CL-VL3-CH1; VL3-L6-VH3-L7-CH1; VH3-L6-VL3-L7-CH1; VL3-L6-VH3-L7-CL; VH3-L6-VL3-L7-CL; VL3-L6-VH3-L7-CH1-L8-CL; VH3-L6-VL3-L7-CH1-L8-CL; VL3-L6-VH3-L7-CL-L8-CH1; VH3-L6-VL3-L7-CL-L8-CH1; VL3-L6-CL-L7-VH3-L8-CH1; VL3-L6-CH1-L7-VH3-L8-CL; VH3-L6-CH1-L7-VL3-L8-CL; VH3-L6-CL-L7-VL3-L8-CH1; VL3-VH3-L6-CH1-CL; VH3-VL3-L6-CH1-CL; VL3-VH3-L6-CL-CH1; VH3-VL3-L6-CL-CH1; VL3-CL-L6-VH3-CH1; VL3-CH1-L6-VH3-CL; VH3-CH1-L6-VL3-CL; or VH3-CL-L6-VL3-CH1. In some aspects, the first polypeptide has a structure represented by VH1-L1-VH2-L2-VL2-L3-VL1-L4-CL-L5-CH1 and the second polypeptide has a structure represented by VL3-VH3-CH1; VH3-VL3-CH1; VL3-VH3-CL; VH3-VL3-CL; VL3-VH3-CH1-CL; VH3-VL3-CH1-CL; VL3-VH3-CL-CH1; VH3-VL3-CL-CH1; VL3-CL-VH3-CH1; VL3-CH1-VH3-CL; VH3-CH1-VL3-CL; VH3-CL-VL3-CH1; VL3-L6-VH3-L7-CH1; VH3-L6-VL3-L7-CH1; VL3-L6-VH3-L7-CL; VH3-L6-VL3-L7-CL; VL3-L6-VH3-L7-CH1-L8-CL; VH3-L6-VL3-L7-CH1-L8-CL; VL3-L6-VH3-L7-CL-L8-CH1; VH3-L6-VL3-L7-CL-L8-CH1; VL3-L6-CL-L7-VH3-L8-CH1; VL3-L6-CH1-L7-VH3-L8-CL; VH3-L6-CH1-L7-VL3-L8-CL; VH3-L6-CL-L7-VL3-L8-CH1; VL3-VH3-L6-CH1-CL; VH3-VL3-L6-CH1-CL; VL3-VH3-L6-CL-CH1; VH3-VL3-L6-CL-CH1; VL3-CL-L6-VH3-CH1; VL3-CH1-L6-VH3-CL; VH3-CH1-L6-VL3-CL; or VH3-CL-L6-VL3-CH1. The VL1, VL2, VL3, VH1, VH2, and/or VH3 may specifically bind to A2AR, APRIL, ATPDase, BAFF, BAFFR, BCMA, BlyS, BTK, BTLA, B7DC, B7H1, B7H2, B7H3, B7H4, B7H5, B7H6, B7H7, B7RP1, B7-4, C3, C5, CCL2, CCL3, CCL4, CCL5, CCL7, CCL8, CCL11, CCL15, CCL17, CCL19, CCL20, CCL21, CCL25 CCR3, CCR4, CD3, CD19, CD20, CD24, CD27, CD28, CD38, CD39, CD40, CD40L, CD47, CD52, CD70, CD80, CD86, CD123, CD133, CD137, CD137L, CD160, CD272, CEACAM5, CLEC9, CLEC91, CRTH2, CSF-1, CSF-2, CSF-3, CXCL1, CXCL2, CXCL4, CXCL12, CXCL13, CXCR3, cMet, CTLA4, DLL3, DNGR-1, E-cadherin, EGFR, ENTPD1, EpCAM, FCER1, FCER1A, FCER2, FGFR, FLAP, FOLH1, Gi24, GITR, GITRL, GPR5, HER2, HER3, ICOSL, ICOS, HHLA2, HMGB1, HVEM, IDO, IFNa, IgE, IGF1R, IL2Rbeta, IL1, IL1A, IL1B, IL1F10, IL2, IL4, IL4Ra, IL5, IL5R, IL6, IL7, IL7Ra, IL8, IL9, IL9R, IL10, rhIL10, IL12, IL13, IL13Ra1, IL13Ra2, IL15, IL17, IL17Rb, IL18, IL22, IL23, IL25, IL7, IL33, IL35, ITGB4, ITK, KIR, LAG3, LAMP1, leptin, LPFS2, MHC class II, MUC-1, MUC-16, NCR3LG1, NKG2D, NKp46, NTPDase-1, OX40, OX40L, PD-1, PD-L1, PD-L2, PROM1, S1S2, SIRPalpha, SISP1, SLC, SPG64, ST2, STEAP1, STEAP2, Syk kinase, STEAP1, TROP2, TACI, TDO, T14, TIGIT, TIM3, TLR, TLR2, TLR4, TLR5, TLR9, TMEF1, TNFa, TNFRSF7, Tp55, TREM1, TSLP, TSLPR, TWEAK, VEGF, VISTA, Vstm3, WUCAM, DLL4, TGFbeta, GP100, GPRC5D, CD30 or CD16A. For the avoidance of doubt, all the antigen binding polypeptide complex structures described herein can be combined with any one or more of the targets described herein. Any and all disclosure herein in relation to targets for antigen binding polypeptides of the invention is generally applicable, and applies equally and without reservation to each and every antigen binding polypeptide and antigen binding polypeptide complex described herein. For the avoidance of doubt, the VL1, VL2, VL3, VH1, VH2, and/or VH3 of each and every antigen binding polypeptide and antigen binding polypeptide complex described herein may independently bind to any one of said particularly preferred targets.

[0171] In other aspects, the invention is directed to an antigen binding polypeptide complex comprising a first polypeptide and a second polypeptide; wherein the first polypeptide has a structure represented by VL1-VL2-VH2-VH1-CH1-Fc; VH1-VH2-VL2-VL1-CH1-Fc; VL1-VL2-VH2-VH1-CL-Fc; VH1-VH2-VL2-VL1-CL-Fc; VL1-VL2-VH2-VH1-CH1-CL-Fc; VH1-VH2-VL2-VL1-CH1-CL-Fc; VL1-VL2-VH2-VH1-CL-CH1-Fc; VH1-VH2-VL2-VL1-CL-CH1-Fc; VL1-L1-VL2-L2-VH2-L3-VH1-L4-CH1-Fc; VH1-L1-VH2-L2-VL2-L3-VL1-L4-CH1-Fc; VL1-L1-VL2-L2-VH2-L3-VH1-L4-CL-Fc; VH1-L1-VH2-L2-VL2-L3-VL1-L4-CL-Fc; VL1-L1-VL2-L2-VH2-L3-VH1-L4-CH1-L5-CL-Fe; VH1-L1-VH2-L2-VL2-L3-VL1-L4-CH1-L5-CL-Fc; VL1-L1-VL2-L2-VH2-L3-VH1-L4-CL-L5-CH1-Fc; or VH1-L1-VH2-L2-VL2-L3-VL1-L4-CL-L5-CH1-Fc; wherein the second polypeptide has a structure represented by VL3-VH3-CH1-Fc; VH3-VL3-CH1-Fc; VL3-VH3-CL-Fc; VH3-VL3-CL-Fc; VL3-VH3-CH1-CL-Fc; VH3-VL3-CH1-CL-Fe; VL3-VH3-CL-CH1-Fc; VH3-VL3-CL-CH1-Fc; VL3-CL-VH3-CH1-Fc; VL3-CH1-VH3-CL-Fc; VH3-CH1-VL3-CL-Fc; VH3-CL-VL3-CH1-Fc; VL3-L6-VH3-L7-CH1-Fc; VH3-L6-VL3-L7-CH1-Fc; VL3-L6-VH3-L7-CL-Fc; VH3-L6-VL3-L7-CL-Fc; VL3-L6-VH3-L7-CH1-L8-CL-Fc; VH3-L6-VL3-L7-CH1-L8-CL-Fc; VL3-L6-VH3-L7-CL-L8-CH1-Fc; VH3-L6-VL3-L7-CL-L8-CH1-Fc; VL3-L6-CL-L7-VH3-L8-CH1-Fc; VL3-L6-CH1-L7-VH3-L8-CL-Fc; VH3-L6-CH1-L7-VL3-L8-CL-Fc; VH3-L6-CL-L7-VL3-L8-CH1-Fc; VL3-VH3-L6-CH1-CL-Fc; VH3-VL3-L6-CH1-CL-Fc; VL3-VH3-L6-CL-CH1-Fc; VH3-VL3-L6-CL-CH1-Fc; VL3-CL-L6-VH3-CH1-Fc; VL3-CH1-L6-VH3-CL-Fc; VH3-CH1-L6-VL3-CL-Fc; or VH3-CL-L6-VL3-CH1-Fc; wherein VL1 is a first immunoglobulin light chain variable region that specifically binds to A2AR, APRIL, ATPDase, BAFF, BAFFR, BCMA, BlyS, BTK, BTLA, B7DC, B17H1, B17H2, B7H3, B7H4, B7H15, B7H6, B7H7, B7RP1, B17-4, C3, C5, CCL2, CCL3, CCL4, CCL5, CCL7, CCL8, CCL11, CCL15, CCL17, CCL19, CCL20, CCL21, CCL25 CCR3, CCR4, CD3, CD19, CD20, CD24, CD27, CD28, CD38, CD39, CD40, CD40L, CD47, CD52, CD70, CD80, CD86, CD123, CD133, CD137, CD137L, CD160, CD272, CEACAM5, CLEC9, CLEC91, CRTH2, CSF-1, CSF-2, CSF-3, CXCL1, CXCL2, CXCL4, CXCL12, CXCL13, CXCR3, cMet, CTLA4, DLL3, DNGR-1, E-cadherin, EGFR, ENTPD1, EpCAM, FCER1, FCER1A, FCER2, FGFR, FLAP, FOLH1, Gi24, GITR, GITRL, GPR5, HER2, HER3, ICOSL, ICOS, HHLA2, HMGB1, HVEM, IDO, IFNa, IgE, IGF1R, IL2Rbeta, IL1, IL1A, IL1B, IL1F10, IL2, IL4, IR4Ra, IL5, IL5R, IL6, IL7, IL7Ra, IL8, IL9, IL9R, IL10, rhIL10, IL12, IL13, R13Ra1, IL13Ra2, IL15, IL17, IL17Rb, IL18, IL22, IL23, IL25, IL7, IL33, IL35, ITGB4, ITK, KIR, LAG3, LAMP1, leptin, LPFS2, MHC class II, MUC-1, MUC-16, NCR3LG1, NKG2D, NKp46, NTPDase-1, OX40, OX40L, PD-1, PD-L1, PD-L2, PROM1, S152, SIRPalpha, SISP1, SLC, SPG64, ST2, STEAP1, STEAP2, Syk kinase, STEAP1, TROP2, TACI, TDO, T14, TIGIT, TIM3, TLR, TLR2, TLR4, TLR5, TLR9, TMEF1, TNFa, TNFRSF7, Tp55, TREM1, TSLP, TSLPR, TWEAK, VEGF, VISTA, Vstm3, WUCAM, DLL4, TGFbeta, GP100, GPRC5D, CD30 or CD16A; VL2 is a second immunoglobulin light chain variable region that specifically binds to A2AR, APRIL, ATPDase, BAFF, BAFFR, BCMA, BlyS, BTK, BTLA, B7DC, B7H1, B7H2, B7H3, B7H4, B7H5, B7H6, B7H7, B7RP1, B7-4, C3, C5, CCL2, CCL3, CCL4, CCL5, CCL7, CCL8, CCL11, CCL15, CCL17, CCL19, CCL20, CCL21, CCL25 CCR3, CCR4, CD3, CD19, CD20, CD24, CD27, CD28, CD38, CD39, CD40, CD40L, CD47, CD52, CD70, CD80, CD86, CD123, CD133, CD137, CD137L, CD160, CD272, CEACAM5, CLEC9, CLEC91, CRTH2, CSF-1, CSF-2, CSF-3, CXCL1, CXCL2, CXCL4, CXCL12, CXCL13, CXCR3, cMet, CTLA4, DLL3, DNGR-1, E-cadherin, EGFR, ENTPD1, EpCAM, FCER1, FCER1A, FCER2, FGFR, FLAP, FOLH1, Gi24, GITR, GITRL, GPR5, HER2, HER3, ICOSL, ICOS, HHLA2, HMGB1, HVEM, IDO, IFNa, IgE, IGF1R, IL2Rbeta, IL1, IL1A, IL1B, IL1F10, IL2, IL4, IL4Ra, IL5, IL5R, IL6, IL7, IL7Ra, IL8, IL9, IL9R, IL10, rhIL10, IL12, IL13, IL13Ra1, IL13Ra2, IL15, I17, IL17Rb, IL18, IR22, IL23, IL25, IL7, IL33, IL35, ITGB4, ITK, KIR, LAG3, LAMP1, leptin, LPFS2, MHC class II, MUC-1, MUC-16, NCR3LG1, NKG2D, NKp46, NTPDase-1, OX40, OX40L, PD-1, PD-L1, PD-L2, PROM1, S1S2, SIRPalpha, SISP1, SLC, SPG64, ST2, STEAP1, STEAP2, Syk kinase, STEAP1, TROP2, TACI, TDO, T14, TIGIT, TIM3, TLR, TLR2, TLR4, TLRS, TLR9, TMEF1, TNFa, TNFRSF7, Tp55, TREM1, TSLP, TSLPR, TWEAK, VEGF, VISTA, Vstm3, WUCAM, DLL4, TGFbeta, GP100, GPRC5D, CD30 or CD16A; VL3 is a third immunoglobulin light chain variable region that specifically binds to A2AR, APRIL, ATPDase, BAFF, BAFFR, BCMA, BlyS, BTK, BTLA, B7DC, B7H1, B7H2, B7B3, B7B4, B7H5, B7H6, B7H7, B7RP1, B7-4, C3, C5, CCL2, CCL3, CCL4, CCL5, CCL7, CCL8, CCL11, CCL15, CCL17, CCL19, CCL20, CCL21, CCL25 CCR3, CCR4, CD3, CD19, CD20, CD24, CD27, CD28, CD38, CD39, CD40, CD40L, CD47, CD52, CD70, CD80, CD86, CD123, CD133, CD137, CD137L, CD160, CD272, CEACAM5, CLEC9, CLEC91, CRTH2, CSF-1, CSF-2, CSF-3, CXCL1, CXCL2, CXCL4, CXCL12, CXCL13, CXCR3, cMet, CTLA4, DLL3, DNGR-1, E-cadherin, EGFR, ENTPD1, EpCAM, FCER1, FCER1A, FCER2, FGFR, FLAP, FOLH1, Gi24, GITR, GITRL, GPR5, HER2, HER3, ICOSL, ICOS, HHLA2, HMGB1, HVEM, IDO, IFNa, IgE, IGF1R, IL2Rbeta, IL1, IL1A, IL1B, IL1F10, IL2, IL4, IR4Ra, IL5, IL5R, IL6, IL7, IL7Ra, IL8, IL9, IL9R, IL10, rhIL10, IL12, IL13, R13Ra1, IL13Ra2, IL15, IL17, IL17Rb, IL18, IL22, IL23, IL25, IL7, IL33, IL35, ITGB4, ITK, KIR, LAG3, LAMP1, leptin, LPFS2, MHC class II, MUC-1, MUC-16, NCR3LG1, NKG2D, NKp46, NTPDase-1, OX40, OX40L, PD-1, PD-L1, PD-L2, PROM1, S152, SIRPalpha, SISP1, SLC, SPG64, ST2, STEAP1, STEAP2, Syk kinase, STEAP1, TROP2, TACI, TDO, T14, TIGIT, TIM3, TLR, TLR2, TLR4, TLRS, TLR9, TMEF1, TNFa, TNFRSF7, Tp55, TREM1, TSLP, TSLPR, TWEAK, VEGF, VISTA, Vstm3, WUCAM, DLL4, TGFbeta, GP100, GPRC5D, CD30 or CD16A; VH1 is a first immunoglobulin heavy chain variable region that specifically binds to A2AR, APRIL, ATPDase, BAFF, BAFFR, BCMA, BlyS, BTK, BTLA, B7DC, B71, B7B2, B7H3, B7H4, B7H5, B7H6, B7H7, B7RP1, B7-4, C3, C5, CCL2, CCL3, CCL4, CCL5, CCL7, CCL8, CCL11, CCL15, CCL17, CCL19, CCL20, CCL21, CCL25 CCR3, CCR4, CD3, CD19, CD20, CD24, CD27, CD28, CD38, CD39, CD40, CD40L, CD47, CD52, CD70, CD80, CD86, CD123, CD133, CD137, CD137L, CD160, CD272, CEACAM5, CLEC9, CLEC91, CRTH2, CSF-1, CSF-2, CSF-3, CXCL1, CXCL2, CXCL4, CXCL12, CXCL13, CXCR3, cMet, CTLA4, DLL3, DNGR-1, E-cadherin, EGFR, ENTPD1, EpCAM, FCER1, FCER1A, FCER2, FGFR, FLAP, FOLH1, Gi24, GITR, GITRL, GPR5, HER2, HER3, ICOSL, ICOS, HHLA2, HMGB1, HVEM, IDO, IFNa, IgE, IGF1R, 1I2Rbeta, IL1, IL1A, IL1B, IL1F10, IL2, IL4, IL4Ra, IL5, IL5R, IL6, IL7, IL7Ra, IL8, IL9, IL9R, IL10, rhIL10, IL12, IL13, IL13Ra1, IL13Ra2, IL15, IL17, IL17Rb, IL18, IL22, IL23, IL25, IL7, IL33, IL35, ITGB4, ITK, KIR, LAG3, LAMP1, leptin, LPFS2, MHC class II, MUC-1, MUC-16, NCR3LG1, NKG2D, NKp46, NTPDase-1, OX40, OX40L, PD-1, PD-L1, PD-L2, PROM1, S152, SIRPalpha, SISP1, SLC, SPG64, ST2, STEAP1, STEAP2, Syk kinase, STEAP1, TROP2, TACI, TDO, T14, TIGIT, TIM3, TLR, TLR2, TLR4, TLR5, TLR9, TMEF1, TNFa, TNFRSF7, Tp55, TREM1, TSLP, TSLPR, TWEAK, VEGF, VISTA, Vstm3, WUCAM, DLL4, TGFbeta, GP100, GPRC5D, CD30 or CD16A; VH2 is a second immunoglobulin heavy chain variable region that specifically binds to A2AR, APRIL, ATPDase, BAFF, BAFFR, BCMA, BlyS, BTK, BTLA, B7DC, B7H1, B7H2, B7H3, B7H4, B7H5, B7H6, B7H7, B7RP1, B7-4, C3, C5, CCL2, CCL3, CCL4, CCL5, CCL7, CCL8, CCL11, CCL15, CCL17, CCL19, CCL20, CCL21, CCL25 CCR3, CCR4, CD3, CD19, CD20, CD24, CD27, CD28, CD38, CD39, CD40, CD40L, CD47, CD52, CD70, CD80, CD86, CD123, CD133, CD137, CD137L, CD160, CD272, CEACAM5, CLEC9, CLEC91, CRTH2, CSF-1, CSF-2, CSF-3, CXCL1, CXCL2, CXCL4, CXCL12, CXCL13, CXCR3, cMet, CTLA4, DLL3, DNGR-1, E-cadherin, EGFR, ENTPD1, EpCAM, FCER1, FCER1A, FCER2, FGFR, FLAP, FOLH1, Gi24, GITR, GITRL, GPR5, HER2, HER3, ICOSL, ICOS, HHLA2, HMGB1, HVEM, IDO, IFNa, IgE, IGF1R, IL2Rbeta, IL1, IL1A, IL1B, IL1F10, IL2, IL4, IL4Ra, IL5, IL5R, IL6, IL7, IL7Ra, IL8, IL9, IL9R, IL10, rhIL10, IL12, IL13, IL13Ra1, IL13Ra2, IL15, IL17, IL17Rb, IL18, IL22, IL23, IL25, IL7, IL33, IL35, ITGB4, ITK, KIR, LAG3, LAMP1, leptin, LPFS2, MHC class II, MUC-1, MUC-16, NCR3LG1, NKG2D, NKp46, NTPDase-1, OX40, OX40L, PD-1, PD-L1, PD-L2, PROM1, S152, SIRPalpha, SISP1, SLC, SPG64, ST2, STEAP1, STEAP2, Syk kinase, STEAP1, TROP2, TACI, TDO, T14, TIGIT, TIM3, TLR, TLR2, TLR4, TLR5, TLR9, TMEF1, TNFa, TNFRSF7, Tp55, TREM1, TSLP, TSLPR, TWEAK, VEGF, VISTA, Vstm3, WUCAM, DLL4, TGFbeta, GP100, GPRC5D, CD30 or CD16A; VH3 is a third immunoglobulin heavy chain variable region that specifically binds to A2AR, APRIL, ATPDase, BAFF, BAFFR, BCMA, BlyS, BTK, BTLA, B7DC, B7H1, B7H2, B7H3, B7H4, B7H5, B7H6, B7H7, B7RP1, B7-4, C3, C5, CCL2, CCL3, CCL4, CCL5, CCL7, CCL8, CCL11, CCL15, CCL17, CCL19, CCL20, CCL21, CCL25 CCR3, CCR4, CD3, CD19, CD20, CD24, CD27, CD28, CD38, CD39, CD40, CD40L, CD47, CD52, CD70, CD80, CD86, CD123, CD133, CD137, CD137L, CD160, CD272, CEACAM5, CLEC9, CLEC91, CRTH2, CSF-1, CSF-2, CSF-3, CXCL1, CXCL2, CXCL4, CXCL12, CXCL13, CXCR3, cMet, CTLA4, DLL3, DNGR-1, E-cadherin, EGFR, ENTPD1, EpCAM, FCER1, FCER1A, FCER2, FGFR, FLAP, FOLH1, Gi24, GITR, GITRL, GPR5, HER2, HER3, ICOSL, ICOS, HHLA2, HMGB1, HVEM, IDO, IFNa, IgE, IGF1R, I2Rbeta, IL1, IL1A, IL1B, IL1F10, IL2, IL4, IL4Ra, IL5, IL5R, IL6, IL7, IL7Ra, IL8, IL9, IL9R, IL10, rhIL10, IL12, IL13, IL13Ra1, IL13Ra2, IL15, IL17, IL17Rb, IL18, IL22, IL23, IL25, IL7, IL33, IL35, ITGB4, ITK, KIR, LAG3, LAMP1, leptin, LPFS2, MHC class II, MUC-1, MUC-16, NCR3LG1, NKG2D, NKp46, NTPDase-1, OX40, OX40L, PD-1, PD-L1, PD-L2, PROM1, S152, SIRPalpha, SISP1, SLC, SPG64, ST2, STEAP1, STEAP2, Syk kinase, STEAP1, TROP2, TACI, TDO, T14, TIGIT, TIM3, TLR, TLR2, TLR4, TLR5, TLR9, TMEF1, TNFa, TNFRSF7, Tp55, TREM1, TSLP, TSLPR, TWEAK, VEGF, VISTA, Vstm3, WUCAM, DLL4, TGFbeta, GP100, GPRC5D, CD30 or CD16A; Fc is a region comprising an immunoglobulin heavy chain constant region 2 (CH2), an immunoglobulin heavy chain constant region 3 (CH3), and optionally, an immunoglobulin hinge; CH1 is an immunoglobulin heavy chain constant region 1; CL is an immunoglobulin light chain constant region; and L1, L2, L3, L4, L5, L6, L7 and L8 are amino acid linkers. In some aspects, the first polypeptide has a structure represented by VL1-VL2-VH2-VH1-CH1-Fc; VH1-VH2-VL2-VL1-CH1-Fc; VL1-VL2-VH2-VH1-CL-Fc; VH1-VH2-VL2-VL1-CL-Fc; VL1-VL2-VH2-VH1-CH1-CL-Fc; VH1-VH2-VL2-VL1-CH1-CL-Fc; VL1-VL2-VH2-VH1-CL-CH1-Fc; VH1-VH2-VL2-VL1-CL-CH1-Fc; VL1-L1-VL2-L2-VH2-L3-VH1-L4-CH1-Fc; VH1-L1-VH2-L2-VL2-L3-VL1-L4-CH1-Fc; VL1-L1-VL2-L2-VH2-L3-VH1-L4-CL-Fc; VH1-L1-VH2-L2-VL2-L3-VL1-L4-CL-Fc; VL1-L1-VL2-L2-VH2-L3-VH1-L4-CH1-L5-CL-Fc; VH1-L1-VH2-L2-VL2-L3-VL1-L4-CH1-L5-CL-Fc; VL1-L1-VL2-L2-VH2-L3-VH1-L4-CL-L5-CH1-Fc; or VH1-L1-VH2-L2-VL2-L3-VL1-L4-CL-L5-CH1-Fc and the second polypeptide has a structure represented by VL3-VH3-CH1-Fc. In some aspects, the first polypeptide has a structure represented by VL1-VL2-VH2-VH1-CH1-Fc; VH1-VH2-VL2-VL1-CH1-Fc; VL1-VL2-VH2-VH1-CL-Fc; VH1-VH2-VL2-VL1-CL-Fc; VL1-VL2-VH2-VH1-CH1-CL-Fc; VH1-VH2-VL2-VL1-CH1-CL-Fc; VL1-VL2-VH2-VH1-CL-CH1-Fc; VH1-VH2-VL2-VL1-CL-CH1-Fc; VL1-L1-VL2-L2-VH2-L3-VH1-L4-CH1-Fc; VH1-L1-VH2-L2-VL2-L3-VL1-L4-CH1-Fc; VL1-L1-VL2-L2-VH2-L3-VH1-L4-CL-Fc; VH1-L1-VH2-L2-VL2-L3-VL1-L4-CL-Fc; VL1-L1-VL2-L2-VH2-L3-VH1-L4-CH1-L5-CL-Fc; VH1-L1-VH2-L2-VL2-L3-VL1-L4-CH1-L5-CL-Fc; VL1-L1-VL2-L2-VH2-L3-VH1-L4-CL-L5-CH1-Fc; or VH1-L1-VH2-L2-VL2-L3-VL1-L4-CL-L5-CH1-Fc and the second polypeptide has a structure represented by VH3-VL3-CH1-Fc. In some aspects, the first polypeptide has a structure represented by VL1-VL2-VH2-VH1-CH1-Fc; VH1-VH2-VL2-VL1-CH1-Fc; VL1-VL2-VH2-VH1-CL-Fc; VH1-VH2-VL2-VL1-CL-Fc; VL1-VL2-VH2-VH1-CH1-CL-Fc; VH1-VH2-VL2-VL1-CH1-CL-Fc; VL1-VL2-VH2-VH1-CL-CH1-Fc; VH1-VH2-VL2-VL1-CL-CH1-Fc; VL1-L1-VL2-L2-VH2-L3-VH1-L4-CH1-Fc; VH1-L1-VH2-L2-VL2-L3-VL1-L4-CH1-Fc; VL1-L1-VL2-L2-VH2-L3-VH1-L4-CL-Fc; VH1-L1-VH2-L2-VL2-L3-VL1-L4-CL-Fc; VL1-L1-VL2-L2-VH2-L3-VH1-L4-CH1-L5-CL-Fc; VH1-L1-VH2-L2-VL2-L3-VL1-L4-CH1-L5-CL-Fc; VL1-L1-VL2-L2-VH2-L3-VH1-L4-CL-L5-CH1-Fc; or VH1-L1-VH2-L2-VL2-L3-VL1-L4-CL-L5-CH1-Fc and the second polypeptide has a structure represented by VL3-VH3-CL-Fc. In some aspects, the first polypeptide has a structure represented by VL1-VL2-VH2-VH1-CH1-Fc; VH1-VH2-VL2-VL1-CH1-Fc; VL1-VL2-VH2-VH1-CL-Fc; VH1-VH2-VL2-VL1-CL-Fc; VL1-VL2-VH2-VH1-CH1-CL-Fc; VH1-VH2-VL2-VL1-CH1-CL-Fc; VL1-VL2-VH2-VH1-CL-CH1-Fc; VH1-VH2-VL2-VL1-CL-CH1-Fc; VL1-L1-VL2-L2-VH2-L3-VH1-L4-CH1-Fe; VH1-L1-VH2-L2-VL2-L3-VL1-L4-CH1-Fc; VL1-L1-VL2-L2-VH2-L3-VH1-L4-CL-Fc; VH1-L1-VH2-L2-VL2-L3-VL1-L4-CL-Fc; VL1-L1-VL2-L2-VH2-L3-VH1-L4-CH1-L5-CL-Fc; VH1-L1-VH2-L2-VL2-L3-VL1-L4-CH1-L5-CL-Fc; VL1-L1-VL2-L2-VH2-L3-VH1-L4-CL-L5-CH1-Fc; or VH1-L1-VH2-L2-VL2-L3-VL1-L4-CL-L5-CH1-Fc and the second polypeptide has a structure represented by VH3-VL3-CL-Fe. In some aspects, the first polypeptide has a structure represented by VL1-VL2-VH2-VH1-CH1-Fc; VH1-VH2-VL2-VL1-CH1-Fc; VL1-VL2-VH2-VH1-CL-Fc; VH1-VH2-VL2-VL1-CL-Fc; VL1-VL2-VH2-VH1-CH1-CL-Fc; VH1-VH2-VL2-VL1-CH1-CL-Fc; VL1-VL2-VH2-VH1-CL-CH1-Fc; VH1-VH2-VL2-VL1-CL-CH1-Fc; VL1-L1-VL2-L2-VH2-L3-VH1-L4-CH1-Fc; VH1-L1-VH2-L2-VL2-L3-VL1-L4-CH1-Fc; VL1-L1-VL2-L2-VH2-L3-VH1-L4-CL-Fc; VH1-L1-VH2-L2-VL2-L3-VL1-L4-CL-Fc; VL1-L1-VL2-L2-VH2-L3-VH1-L4-CH1-L5-CL-Fc; VH1-L1-VH2-L2-VL2-L3-VL1-L4-CH1-L5-CL-Fc; VL1-L1-VL2-L2-VH2-L3-VH1-L4-CL-L5-CH1-Fc; or VH1-L1-VH2-L2-VL2-L3-VL1-L4-CL-L5-CH1-Fc and the second polypeptide has a structure represented by VL3-VH3-CH1-CL-Fc. In some aspects, the first polypeptide has a structure represented by VL1-VL2-VH2-VH1-CH1-Fc; VH1-VH2-VL2-VL1-CH1-Fc; VL1-VL2-VH2-VH1-CL-Fc; VH1-VH2-VL2-VL1-CL-Fc; VL1-VL2-VH2-VH1-CH1-CL-Fc; VH1-VH2-VL2-VL1-CH1-CL-Fc; VL1-VL2-VH2-VH1-CL-CH1-Fc; VH1-VH2-VL2-VL1-CL-CH1-Fc; VL1-L1-VL2-L2-VH2-L3-VH1-L4-CH1-Fc; VH1-L1-VH2-L2-VL2-L3-VL1-L4-CH1-Fc; VL1-L1-VL2-L2-VH2-L3-VH1-L4-CL-Fc; VH1-L1-VH2-L2-VL2-L3-VL1-L4-CL-Fc; VL1-L1-VL2-L2-VH2-L3-VH1-L4-CH1-L5-CL-Fc; VH1-L1-VH2-L2-VL2-L3-VL1-L4-CH1-L5-CL-Fc; VL1-L1-VL2-L2-VH2-L3-VH1-L4-CL-L5-CH1-Fc; or VH1-L1-VH2-L2-VL2-L3-VL1-L4-CL-L5-CH1-Fc and the second polypeptide has a structure represented by VH3-VL3-CH1-CL-Fc. In some aspects, the first polypeptide has a structure represented by VL1-VL2-VH2-VH1-CH1-Fc; VH1-VH2-VL2-VL1-CH1-Fc; VL1-VL2-VH2-VH1-CL-Fc; VH1-VH2-VL2-VL1-CL-Fc; VL1-VL2-VH2-VH1-CH1-CL-Fc; VH1-VH2-VL2-VL1-CH1-CL-Fc; VL1-VL2-VH2-VH1-CL-CH1-Fc; VH1-VH2-VL2-VL1-CL-CH1-Fc; VL1-L1-VL2-L2-VH2-L3-VH1-L4-CH1-Fc; VH1-L1-VH2-L2-VL2-L3-VL1-L4-CH1-Fc; VL1-L1-VL2-L2-VH2-L3-VH1-L4-CL-Fc; VH1-L1-VH2-L2-VL2-L3-VL1-L4-CL-Fc; VL1-L1-VL2-L2-VH2-L3-VH1-L4-CH1-L5-CL-Fc; VH1-L1-VH2-L2-VL2-L3-VL1-L4-CH1-L5-CL-Fc; VL1-L1-VL2-L2-VH2-L3-VH1-L4-CL-L5-CH1-Fc; or VH1-L1-VH2-L2-VL2-L3-VL1-L4-CL-L5-CH1-Fc and the second polypeptide has a structure represented by VL3-VH3-CL-CH1-Fc. In some aspects, the first polypeptide has a structure represented by VL1-VL2-VH2-VH1-CH1-Fc; VH1-VH2-VL2-VL1-CH1-Fc; VL1-VL2-VH2-VH1-CL-Fc; VH1-VH2-VL2-VL1-CL-Fc; VL1-VL2-VH2-VH1-CH1-CL-Fc; VH1-VH2-VL2-VL1-CH1-CL-Fc; VL1-VL2-VH2-VH1-CL-CH1-Fc; VH1-VH2-VL2-VL1-CL-CH1-Fc; VL1-L1-VL2-L2-VH2-L3-VH1-L4-CH1-Fc; VH1-L1-VH2-L2-VL2-L3-VL1-L4-CH1-Fc; VL1-L1-VL2-L2-VH2-L3-VH1-L4-CL-Fc; VH1-L1-VH2-L2-VL2-L3-VL1-L4-CL-Fc; VL1-L1-VL2-L2-VH2-L3-VH1-L4-CH1-L5-CL-Fc; VH1-L1-VH2-L2-VL2-L3-VL1-L4-CH1-L5-CL-Fc; VL1-L1-VL2-L2-VH2-L3-VH1-L4-CL-L5-CH1-Fe; or VH1-L1-VH2-L2-VL2-L3-VL1-L4-CL-L5-CH1-Fc and the second polypeptide has a structure represented by VH3-VL3-CL-CH1-Fc. In some aspects, the first polypeptide has a structure represented by VL1-VL2-VH2-VH1-CH1-Fe; VH1-VH2-VL2-VL1-CH1-Fc; VL1-VL2-VH2-VH1-CL-Fc; VH1-VH2-VL2-VL1-CL-Fc; VL1-VL2-VH2-VH1-CH1-CL-Fc; VH1-VH2-VL2-VL1-CH1-CL-Fc; VL1-VL2-VH2-VH1-CL-CH1-Fc; VH1-VH2-VL2-VL1-CL-CH1-Fc; VL1-L1-VL2-L2-VH2-L3-VH1-L4-CH1-Fc; VH1-L1-VH2-L2-VL2-L3-VL1-L4-CH1-Fc; VL1-L1-VL2-L2-VH2-L3-VH-L4-CL-Fc; VH1-L1-VH2-L2-VL2-L3-VL1-L4-CL-Fc; VL1-L1-VL2-L2-VH2-L3-VH1-L4-CH-L5-CL-Fc; VH1-L1-VH2-L2-VL2-L3-VL1-L4-CH1-L5-CL-Fc; VL1-L1-VL2-L2-VH2-L3-VH1-L4-CL-L5-CH1-Fc; or VH1-L1-VH2-L2-VL2-L3-VL1-L4-CL-L5-CH1-Fc and the second polypeptide has a structure represented by VL3-CL-VH3-CH1-Fc. In some aspects, the first polypeptide has a structure represented by VL1-VL2-VH2-VH1-CH1-Fc; VH1-VH2-VL2-VL1-CH1-Fc; VL1-VL2-VH2-VH1-CL-Fc; VH1-VH2-VL2-VL1-CL-Fc; VL1-VL2-VH2-VH1-CH1-CL-Fc; VH1-VH2-VL2-VL1-CH1-CL-Fc; VL1-VL2-VH2-VH1-CL-CH1-Fc; VH1-VH2-VL2-VL1-CL-CH1-Fc; VL1-L1-VL2-L2-VH2-L3-VH1-L4-CH1-Fc; VH1-L1-VH2-L2-VL2-L3-VL1-L4-CH1-Fc; VL1-L1-VL2-L2-VH2-L3-VH1-L4-CL-Fc; VH1-L1-VH2-L2-VL2-L3-VL1-L4-CL-Fc; VL1-L1-VL2-L2-VH2-L3-VH1-L4-CH-L5-CL-Fc; VH1-L1-VH2-L2-VL2-L3-VL1-L4-CH1-L5-CL-Fc; VL1-L1-VL2-L2-VH2-L3-VH1-L4-CL-L5-CH1-Fc; or VH1-L1-VH2-L2-VL2-L3-VL1-L4-CL-L5-CH1-Fc and the second polypeptide has a structure represented by VL3-CH1-VH3-CL-Fc. In some aspects, the first polypeptide has a structure represented by VL1-VL2-VH2-VH1-CH1-Fc; VH1-VH2-VL2-VL1-CH1-Fe; VL1-VL2-VH2-VH1-CL-Fc; VH1-VH2-VL2-VL1-CL-Fc; VL1-VL2-VH2-VH1-CH1-CL-Fc; VH1-VH2-VL2-VL1-CH1-CL-Fc; VL1-VL2-VH2-VH1-CL-CH1-Fc; VH1-VH2-VL2-VL1-CL-CH1-Fc; VL1-L1-VL2-L2-VH2-L3-VH1-L4-CH1-Fc; VH1-L1-VH2-L2-VL2-L3-VL1-L4-CH1-Fc; VL1-L1-VL2-L2-VH2-L3-VH1-L4-CL-Fc; VH1-L1-VH2-L2-VL2-L3-VL1-L4-CL-Fc; VL1-L1-VL2-L2-VH2-L3-VH1-L4-CH1-L5-CL-Fc; VH1-L1-VH2-L2-VL2-L3-VL1-L4-CH1-L5-CL-Fc; VL1-L1-VL2-L2-VH2-L3-VH1-L4-CL-L5-CH1-Fc; or VH1-L1-VH2-L2-VL2-L3-VL1-L4-CL-L5-CH1-Fc and the second polypeptide has a structure represented by VH3-CH1-VL3-CL-Fe. In some aspects, the first polypeptide has a structure represented by VL1-VL2-VH2-VH1-CH1-Fc; VH1-VH2-VL2-VL1-CH1-Fc; VL1-VL2-VH2-VH1-CL-Fc; VH1-VH2-VL2-VL1-CL-Fc; VL1-VL2-VH2-VH1-CH1-CL-Fc; VH1-VH2-VL2-VL1-CH1-CL-Fc; VL1-VL2-VH2-VH1-CL-CH1-Fc; VH1-VH2-VL2-VL1-CL-CH1-Fc; VL1-L1-VL2-L2-VH2-L3-VH1-L4-CH1-Fc; VH1-L1-VH2-L2-VL2-L3-VL1-L4-CH1-Fc; VL1-L1-VL2-L2-VH2-L3-VH1-L4-CL-Fc; VH1-L1-VH2-L2-VL2-L3-VL1-L4-CL-Fc; VL1-L1-VL2-L2-VH2-L3-VH1-L4-CH1-L5-CL-Fc; VH1-L1-VH2-L2-VL2-L3-VL1-L4-CH1-L5-CL-Fe; VL1-L1-VL2-L2-VH2-L3-VH1-L4-CL-L5-CH1-Fc; or VH1-L1-VH2-L2-VL2-L3-VL1-L4-CL-L5-CH1-Fc and the second polypeptide has a structure represented by VH3-CL-VL3-CH1-Fc. In some aspects, the first polypeptide has a structure represented by VL1-VL2-VH2-VH1-CH1-Fc; VH1-VH2-VL2-VL1-CH1-Fc; VL1-VL2-VH2-VH1-CL-Fc; VH1-VH2-VL2-VL1-CL-Fc; VL1-VL2-VH2-VH1-CH1-CL-Fc; VH1-VH2-VL2-VL1-CH1-CL-Fc; VL1-VL2-VH2-VH1-CL-CH1-Fc; VH1-VH2-VL2-VL1-CL-CH1-Fc; VL1-L1-VL2-L2-VH2-L3-VH1-L4-CH1-Fc; VH1-L1-VH2-L2-VL2-L3-VL1-L4-CH1-Fc; VL1-L1-VL2-L2-VH2-L3-VH1-L4-CL-Fc; VH1-L1-VH2-L2-VL2-L3-VL1-L4-CL-Fc; VL1-L1-VL2-L2-VH2-L3-VH1-L4-CH1-L5-CL-Fc; VH1-L1-VH2-L2-VL2-L3-VL1-L4-CH1-L5-CL-Fc; VL1-L1-VL2-L2-VH2-L3-VH1-L4-CL-L5-CH1-Fc; or VH1-L1-VH2-L2-VL2-L3-VL1-L4-CL-L5-CH1-Fc and the second polypeptide has a structure represented by VL3-L6-VH3-L7-CH1-Fc. In some aspects, the first polypeptide has a structure represented by VL1-VL2-VH2-VH1-CH1-Fc; VH1-VH2-VL2-VL1-CH1-Fc; VL1-VL2-VH2-VH1-CL-Fc; VH1-VH2-VL2-VL1-CL-Fc; VL1-VL2-VH2-VH1-CH1-CL-Fc; VH1-VH2-VL2-VL1-CH1-CL-Fc; VL1-VL2-VH2-VH1-CL-CH1-Fc; VH1-VH2-VL2-VL1-CL-CH1-Fc; VL1-L1-VL2-L2-VH2-L3-VH1-L4-CH1-Fc; VH1-L1-VH2-L2-VL2-L3-VL1-L4-CH1-Fc; VL1-L1-VL2-L2-VH2-L3-VH1-L4-CL-Fc; VH1-L1-VH2-L2-VL2-L3-VL1-L4-CL-Fc; VL1-L1-VL2-L2-VH2-L3-VH1-L4-CH1-L5-CL-Fc; VH1-L1-VH2-L2-VL2-L3-VL1-L4-CH1-L5-CL-Fc; VL1-L1-VL2-L2-VH2-L3-VH1-L4-CL-L5-CH1-Fc; or VH1-L1-VH2-L2-VL2-L3-VL1-L4-CL-L5-CH1-Fc and the second polypeptide has a structure represented by VH3-L6-VL3-L7-CH1-Fc. In some aspects, the first polypeptide has a structure represented by VL1-VL2-VH2-VH1-CH1-Fc; VH1-VH2-VL2-VL1-CH1-Fc; VL1-VL2-VH2-VH1-CL-Fc; VH1-VH2-VL2-VL1-CL-Fc; VL1-VL2-VH2-VH1-CH1-CL-Fc; VH1-VH2-VL2-VL1-CH1-CL-Fc; VL1-VL2-VH2-VH1-CL-CH1-Fc; VH1-VH2-VL2-VL1-CL-CH1-Fc; VL1-L1-VL2-L2-VH2-L3-VH1-L4-CH1-Fc; VH1-L1-VH2-L2-VL2-L3-VL1-L4-CH1-Fc; VL1-L1-VL2-L2-VH2-L3-VH1-L4-CL-Fc; VH1-L1-VH2-L2-VL2-L3-VL1-L4-CL-Fc; VL1-L1-VL2-L2-VH2-L3-VH1-L4-CH-L5-CL-Fc; VH1-L1-VH2-L2-VL2-L3-VL1-L4-CH1-L5-CL-Fc; VL1-L1-VL2-L2-VH2-L3-VH1-L4-CL-L5-CH1-Fc; or VH1-L1-VH2-L2-VL2-L3-VL1-L4-CL-L5-CH1-Fc and the second polypeptide has a structure represented by VL3-L6-VH3-L7-CL-Fc. In some aspects, the first polypeptide has a structure represented by VL1-VL2-VH2-VH1-CH1-Fc; VH1-VH2-VL2-VL1-CH1-Fc; VL1-VL2-VH2-VH1-CL-Fc; VH1-VH2-VL2-VL1-CL-Fc; VL1-VL2-VH2-VH1-CH1-CL-Fc; VH1-VH2-VL2-VL1-CH1-CL-Fc; VL1-VL2-VH2-VH1-CL-CH1-Fc; VH1-VH2-VL2-VL1-CL-CH1-Fc; VL1-L1-VL2-L2-VH2-L3-VH1-L4-CH1-Fc; VH1-L1-VH2-L2-VL2-L3-VL1-L4-CH1-Fc; VL1-L1-VL2-L2-VH2-L3-VH1-L4-CL-Fc; VH1-L1-VH2-L2-VL2-L3-VL1-L4-CL-Fc; VL1-L1-VL2-L2-VH2-L3-VH1-L4-CH1-L5-CL-Fc; VH1-L1-VH2-L2-VL2-L3-VL1-L4-CH1-L5-CL-Fc; VL1-L1-VL2-L2-VH2-L3-VH1-L4-CL-L5-CH1-Fc; or VH1-L1-VH2-L2-VL2-L3-VL1-L4-CL-L5-CH1-Fc and the second polypeptide has a structure represented by VH3-L6-VL3-L7-CL-Fe. In some aspects, the first polypeptide has a structure represented by VL1-VL2-VH2-VH1-CH1-Fc; VH1-VH2-VL2-VL1-CH1-Fc; VL1-VL2-VH2-VH1-CL-Fc; VH1-VH2-VL2-VL1-CL-Fc; VL1-VL2-VH2-VH1-CH1-CL-Fc; VH1-VH2-VL2-VL1-CH1-CL-Fc; VL1-VL2-VH2-VH1-CL-CH1-Fc; VH1-VH2-VL2-VL1-CL-CH1-Fc; VL1-L1-VL2-L2-VH2-L3-VH1-L4-CH1-Fc; VH1-L1-VH2-L2-VL2-L3-VL1-L4-CH1-Fc; VL1-L1-VL2-L2-VH2-L3-VH1-L4-CL-Fc; VH1-L1-VH2-L2-VL2-L3-VL1-L4-CL-Fc; VL1-L1-VL2-L2-VH2-L3-VH1-L4-CH1-L5-CL-Fc; VH1-L1-VH2-L2-VL2-L3-VL1-L4-CH1-L5-CL-Fc; VL1-L1-VL2-L2-VH2-L3-VH1-L4-CL-L5-CH1-Fc; or VH1-L1-VH2-L2-VL2-L3-VL1-L4-CL-L5-CH1-Fc and the second polypeptide has a structure represented by VL3-L6-VH3-L7-CH1-L8-CL-Fc. In some aspects, the first polypeptide has a structure represented by VL1-VL2-VH2-VH1-CH1-Fc; VH1-VH2-VL2-VL1-CH1-Fc; VL1-VL2-VH2-VH1-CL-Fc; VH1-VH2-VL2-VL1-CL-Fe; VL1-VL2-VH2-VH1-CH1-CL-Fc; VH1-VH2-VL2-VL1-CH1-CL-Fc; VL1-VL2-VH2-VH1-CL-CH1-Fc; VH1-VH2-VL2-VL1-CL-CH1-Fc; VL1-L1-VL2-L2-VH2-L3-VH1-L4-CH1-Fc; VH1-L1-VH2-L2-VL2-L3-VL1-L4-CH1-Fc; VL1-L1-VL2-L2-VH2-L3-VH1-L4-CL-Fc; VH1-L1-VH2-L2-VL2-L3-VL1-L4-CL-Fc; VL1-L1-VL2-L2-VH2-L3-VH1-L4-CH1-L5-CL-Fc; VH1-L1-VH2-L2-VL2-L3-VL1-L4-CH1-L5-CL-Fc; VL1-L1-VL2-L2-VH2-L3-VH1-L4-CL-L5-CH1-Fc; or VH1-L1-VH2-L2-VL2-L3-VL1-L4-CL-L5-CH1-Fc and the second polypeptide has a structure represented by VH3-L6-VL3-L7-CH1-L8-CL-Fc. In some aspects, the first polypeptide has a structure represented by VL1-VL2-VH2-VH1-CH1-Fc; VH1-VH2-VL2-VL1-CH1-Fc; VL1-VL2-VH2-VH1-CL-Fc; VH1-VH2-VL2-VL1-CL-Fe; VL1-VL2-VH2-VH1-CH1-CL-Fc; VH1-VH2-VL2-VL1-CH1-CL-Fc; VL1-VL2-VH2-VH1-CL-CH1-Fc; VH1-VH2-VL2-VL1-CL-CH1-Fc; VL1-L1-VL2-L2-VH2-L3-VH1-L4-CH1-Fc; VH1-L1-VH2-L2-VL2-L3-VL1-L4-CH1-Fc; VL1-L1-VL2-L2-VH2-L3-VH1-L4-CL-Fc; VH1-L1-VH2-L2-VL2-L3-VL1-L4-CL-Fc; VL1-L1-VL2-L2-VH2-L3-VH1-L4-CH1-L5-CL-Fc; VH1-L1-VH2-L2-VL2-L3-VL1-L4-CH-L5-CL-Fc; VL1-L1-VL2-L2-VH2-L3-VH1-L4-CL-L5-CH1-Fc; or VH1-L1-VH2-L2-VL2-L3-VL1-L4-CL-L5-CH1-Fc and the second polypeptide has a structure represented by VL3-L6-VH3-L7-CL-L8-CH1-Fc. In some aspects, the first polypeptide has a structure represented by VL1-VL2-VH2-VH1-CH1-Fc; VH1-VH2-VL2-VL1-CH1-Fc; VL1-VL2-VH2-VH1-CL-Fc; VH1-VH2-VL2-VL1-CL-Fe; VL1-VL2-VH2-VH1-CH1-CL-Fc; VH1-VH2-VL2-VL1-CH1-CL-Fc; VL1-VL2-VH2-VH1-CL-CH1-Fc; VH1-VH2-VL2-VL1-CL-CH1-Fc; VL1-L1-VL2-L2-VH2-L3-VH1-L4-CH1-Fc; VH1-L1-VH2-L2-VL2-L3-VL1-L4-CH1-Fc; VL1-L1-VL2-L2-VH2-L3-VH1-L4-CL-Fc; VH1-L1-VH2-L2-VL2-L3-VL1-L4-CL-Fc; VL1-L1-VL2-L2-VH2-L3-VH1-L4-CH-L5-CL-Fc; VH1-L1-VH2-L2-VL2-L3-VL1-L4-CH1-L5-CL-Fc; VL1-L1-VL2-L2-VH2-L3-VH1-L4-CL-L5-CH1-Fc; or VH1-L1-VH2-L2-VL2-L3-VL1-L4-CL-L5-CH1-Fc and the second polypeptide has a structure represented by VH3-L6-VL3-L7-CL-L8-CH1-Fc. In some aspects, the first polypeptide has a structure represented by VL1-VL2-VH2-VH1-CH1-Fc; VH1-VH2-VL2-VL1-CH1-Fc; VL1-VL2-VH2-VH1-CL-Fc; VH1-VH2-VL2-VL1-CL-Fe; VL1-VL2-VH2-VH1-CH1-CL-Fc; VH-VH2-VL2-VL1-CH1-CL-Fc; VL1-VL2-VH2-VH1-CL-CH1-Fc; VH1-VH2-VL2-VL1-CL-CH1-Fc; VL1-L1-VL2-L2-VH2-L3-VH1-L4-CH1-Fc; VH1-L1-VH2-L2-VL2-L3-VL1-L4-CH1-Fc; VL1-L1-VL2-L2-VH2-L3-VH1-L4-CL-Fc; VH1-L1-VH2-L2-VL2-L3-VL1-L4-CL-Fc; VL1-L1-VL2-L2-VH2-L3-VH1-L4-CH1-L5-CL-Fc; VH1-L1-VH2-L2-VL2-L3-VL1-L4-CH1-L5-CL-Fc; VL1-L1-VL2-L2-VH2-L3-VH1-L4-CL-L5-CH1-Fc; or VH1-L1-VH2-L2-VL2-L3-VL1-L4-CL-L5-CH1-Fc and the second polypeptide has a structure represented by VL3-L6-CL-L7-VH3-L8-CH1-Fe. In some aspects, the first polypeptide has a structure represented by VL1-VL2-VH2-VH1-CH1-Fc; VH1-VH2-VL2-VL1-CH1-Fc; VL1-VL2-VH2-VH1-CL-Fc; VH-VH2-VL2-VL1-CL-Fe; VL1-VL2-VH2-VH1-CH1-CL-Fc; VH-VH2-VL2-VL1-CH1-CL-Fc; VL1-VL2-VH2-VH1-CL-CH1-Fc; VH1-VH2-VL2-VL1-CL-CH1-Fc; VL1-L1-VL2-L2-VH2-L3-VH1-L4-CH1-Fc; VH1-L1-VH2-L2-VL2-L3-VL1-L4-CH1-Fc; VL1-L1-VL2-L2-VH2-L3-VH1-L4-CL-Fc; VH1-L1-VH2-L2-VL2-L3-VL1-L4-CL-Fc; VL1-L1-VL2-L2-VH2-L3-VH1-L4-CH1-L5-CL-Fc; VH1-L1-VH2-L2-VL2-L3-VL1-L4-CH1-L5-CL-Fc; VL1-L1-VL2-L2-VH2-L3-VH1-L4-CL-L5-CH1-Fc; or VH1-L1-VH2-L2-VL2-L3-VL1-L4-CL-L5-CH1-Fc and the second polypeptide has a structure represented by VL3-L6-CH1-L7-VH3-L8-CL-Fc. In some aspects, the first polypeptide has a structure represented by VL1-VL2-VH2-VH1-CH1-Fc; VH1-VH2-VL2-VL1-CH1-Fc; VL1-VL2-VH2-VH1-CL-Fc; VH-VH2-VL2-VL1-CL-Fe; VL1-VL2-VH2-VH1-CH1-CL-Fc; VH-VH2-VL2-VL1-CH1-CL-Fc; VL1-VL2-VH2-VH1-CL-CH1-Fc; VH1-VH2-VL2-VL1-CL-CH1-Fc; VL1-L1-VL2-L2-VH2-L3-VH1-L4-CH1-Fc; VH1-L1-VH2-L2-VL2-L3-VL1-L4-CH1-Fc; VL1-L1-VL2-L2-VH2-L3-VH1-L4-CL-Fc; VH1-L1-VH2-L2-VL2-L3-VL1-L4-CL-Fc; VL1-L1-VL2-L2-VH2-L3-VH1-L4-CH1-L5-CL-Fc; VH1-L1-VH2-L2-VL2-L3-VL1-L4-CH-L5-CL-Fc; VL1-L1-VL2-L2-VH2-L3-VH1-L4-CL-L5-CH1-Fc; or VH1-L1-VH2-L2-VL2-L3-VL1-L4-CL-L5-CH1-Fc and the second polypeptide has a structure represented by VH3-L6-CH1-L7-VL3-L8-CL-Fc. In some aspects, the first polypeptide has a structure represented by VL1-VL2-VH2-VH1-CH1-Fc; VH1-VH2-VL2-VL1-CH1-Fc; VL1-VL2-VH2-VH1-CL-Fc; VH-VH2-VL2-VL1-CL-Fe; VL1-VL2-VH2-VH1-CH1-CL-Fc; VH-VH2-VL2-VL1-CH1-CL-Fc; VL1-VL2-VH2-VH1-CL-CH1-Fc; VH1-VH2-VL2-VL1-CL-CH1-Fc; VL1-L1-VL2-L2-VH2-L3-VH1-L4-CH1-Fc; VH1-L1-VH2-L2-VL2-L3-VL1-L4-CH1-Fc; VL1-L1-VL2-L2-VH2-L3-VH1-L4-CL-Fc; VH1-L1-VH2-L2-VL2-L3-VL1-L4-CL-Fc; VL1-L1-VL2-L2-VH2-L3-VH1-L4-CH1-L5-CL-Fc; VH1-L1-VH2-L2-VL2-L3-VL1-L4-CH-L5-CL-Fc; VL1-L1-VL2-L2-VH2-L3-VH1-L4-CL-L5-CH1-Fc; or VH1-L1-VH2-L2-VL2-L3-VL1-L4-CL-L5-CH1-Fc and the second polypeptide has a structure represented by VH3-L6-CL-L7-VL3-L8-CH1-Fc. In some aspects, the first polypeptide has a structure represented by VL1-VL2-VH2-VH1-CH1-Fc; VH1-VH2-VL2-VL1-CH1-Fc; VL1-VL2-VH2-VH1-CL-Fc; VH1-VH2-VL2-VL1-CL-Fe; VL1-VL2-VH2-VH1-CH1-CL-Fc; VH1-VH2-VL2-VL1-CH1-CL-Fc; VL1-VL2-VH2-VH1-CL-CH-Fc; VH1-VH2-VL2-VL1-CL-CH1-Fc; VL1-L1-VL2-L2-VH2-L3-VH1-L4-CH1-Fc; VH1-L1-VH2-L2-VL2-L3-VL1-L4-CH1-Fc; VL1-L1-VL2-L2-VH2-L3-VH1-L4-CL-Fc; VH1-L1-VH2-L2-VL2-L3-VL1-L4-CL-Fc; VL1-L1-VL2-L2-VH2-L3-VH-L4-CH-L5-CL-Fc; VH1-L1-VH2-L2-VL2-L3-VL1-L4-CH-L5-CL-Fc; VL1-L1-VL2-L2-VH2-L3-VH1-L4-CL-L5-CH1-Fc; or VH1-L1-VH2-L2-VL2-L3-VL1-L4-CL-L5-CH1-Fc and the second polypeptide has a structure represented by VL3-VH3-L6-CH1-CL-Fc. In some aspects, the first polypeptide has a structure represented by VL1-VL2-VH2-VH1-CH1-Fc; VH-VH2-VL2-VL1-CH1-Fc; VL1-VL2-VH2-VH1-CL-Fc; VH1-VH2-VL2-VL1-CL-Fc; VL1-VL2-VH2-VH1-CH1-CL-Fc; VH1-VH2-VL2-VL1-CH1-CL-Fc; VL1-VL2-VH2-VH1-CL-CH1-Fc; VH1-VH2-VL2-VL1-CL-CH1-Fc; VL1-L1-VL2-L2-VH2-L3-VH1-L4-CH1-Fc; VH1-L1-VH2-L2-VL2-L3-VL1-L4-CH1-Fc; VL1-L1-VL2-L2-VH2-L3-VH1-L4-CL-Fc; VH1-L1-VH2-L2-VL2-L3-VL1-L4-CL-Fc; VL1-L1-VL2-L2-VH2-L3-VH1-L4-CH1-L5-CL-Fc; VH1-L1-VH2-L2-VL2-L3-VL1-L4-CH1-L5-CL-Fc; VL1-L1-VL2-L2-VH2-L3-VH1-L4-CL-L5-CH1-Fc; or VH1-L1-VH2-L2-VL2-L3-VL1-L4-CL-L5-CH1-Fc and the second polypeptide has a structure represented by VH3-VL3-L6-CH1-CL-Fc. In some aspects, the first polypeptide has a structure represented by VL1-VL2-VH2-VH1-CH1-Fc; VH1-VH2-VL2-VL1-CH1-Fc; VL1-VL2-VH2-VH1-CL-Fc; VH1-VH2-VL2-VL1-CL-Fc; VL1-VL2-VH2-VH1-CH1-CL-Fc; VH1-VH2-VL2-VL1-CH1-CL-Fc; VL1-VL2-VH2-VH1-CL-CH1-Fc; VH1-VH2-VL2-VL1-CL-CH1-Fc; VL1-L1-VL2-L2-VH2-L3-VH1-L4-CH1-Fc; VH1-L1-VH2-L2-VL2-L3-VL1-L4-CH1-Fc; VL1-L1-VL2-L2-VH2-L3-VH1-L4-CL-Fc; VH1-L1-VH2-L2-VL2-L3-VL1-L4-CL-Fc; VL1-L1-VL2-L2-VH2-L3-VH1-L4-CH1-L5-CL-Fc; VH1-L1-VH2-L2-VL2-L3-VL1-L4-CH1-L5-CL-Fc; VL1-L1-VL2-L2-VH2-L3-VH1-L4-CL-L5-CH1-Fc; or VH1-L1-VH2-L2-VL2-L3-VL1-L4-CL-L5-CH1-Fc and the second polypeptide has a structure represented by VL3-VH3-L6-CL-CH1-Fe. In some aspects, the first polypeptide has a structure represented by VL1-VL2-VH2-VH-CH1-Fc; VH1-VH2-VL2-VL1-CH1-Fc; VL1-VL2-VH2-VH1-CL-Fc; VH1-VH2-VL2-VL1-CL-Fc; VL1-VL2-VH2-VH-CH1-CL-Fc; VH1-VH2-VL2-VL1-CH1-CL-Fc; VL1-VL2-VH2-VH1-CL-CH1-Fc; VH1-VH2-VL2-VL1-CL-CH1-Fc; VL1-L1-VL2-L2-VH2-L3-VH1-L4-CH1-Fc; VH1-L1-VH2-L2-VL2-L3-VL1-L4-CH1-Fc; VL1-L1-VL2-L2-VH2-L3-VH1-L4-CL-Fc; VH1-L1-VH2-L2-VL2-L3-VL1-L4-CL-Fc; VL1-L1-VL2-L2-VH2-L3-VH-L4-CH-L5-CL-Fc; VH1-L1-VH2-L2-VL2-L3-VL1-L4-CH-L5-CL-Fc; VL1-L1-VL2-L2-VH2-L3-VH1-L4-CL-L5-CH1-Fc; or VH1-L1-VH2-L2-VL2-L3-VL1-L4-CL-L5-CH1-Fc and the second polypeptide has a structure represented by VH3-VL3-L6-CL-CH1-Fe. In some aspects, the first polypeptide has a structure represented by VL1-VL2-VH2-VH1-CH1-Fc; VH-VH2-VL2-VL1-CH1-Fc; VL1-VL2-VH2-VH1-CL-Fc; VH1-VH2-VL2-VL1-CL-Fc; VL1-VL2-VH2-VH1-CH1-CL-Fc; VH1-VH2-VL2-VL1-CH1-CL-Fc; VL1-VL2-VH2-VH1-CL-CH1-Fc; VH1-VH2-VL2-VL1-CL-CH1-Fc; VL1-L1-VL2-L2-VH2-L3-VH-L4-CH1-Fc; VH1-L1-VH2-L2-VL2-L3-VL1-L4-CH1-Fc; VL1-L1-VL2-L2-VH2-L3-VH1-L4-CL-Fc; VH1-L1-VH2-L2-VL2-L3-VL1-L4-CL-Fc; VL1-L1-VL2-L2-VH2-L3-VH-L4-CH-L5-CL-Fc; VH1-L1-VH2-L2-VL2-L3-VL1-L4-CH-L5-CL-Fc; VL1-L1-VL2-L2-VH2-L3-VH1-L4-CL-L5-CH1-Fc; or VH1-L1-VH2-L2-VL2-L3-VL1-L4-CL-L5-CH1-Fc and the second polypeptide has a structure represented by VL3-CL-L6-VH3-CH1-Fe. In some aspects, the first polypeptide has a structure represented by VL1-VL2-VH2-VH1-CH1-Fc; VH-VH2-VL2-VL1-CH1-Fc; VL1-VL2-VH2-VH1-CL-Fc; VH1-VH2-VL2-VL1-CL-Fc; VL1-VL2-VH2-VH1-CH1-CL-Fc; VH1-VH2-VL2-VL1-CH1-CL-Fc; VL1-VL2-VH2-VH1-CL-CH1-Fc; VH1-VH2-VL2-VL1-CL-CH1-Fc; VL1-L1-VL2-L2-VH2-L3-VH-L4-CH1-Fc; VH1-L1-VH2-L2-VL2-L3-VL1-L4-CH1-Fc; VL1-L1-VL2-L2-VH2-L3-VH1-L4-CL-Fc; VH1-L1-VH2-L2-VL2-L3-VL1-L4-CL-Fc; VL1-L1-VL2-L2-VH2-L3-VH-L4-CH-L5-CL-Fc; VH1-L1-VH2-L2-VL2-L3-VL1-L4-CH-L5-CL-Fc; VL1-L1-VL2-L2-VH2-L3-VH1-L4-CL-L5-CH1-Fc; or VH1-L1-VH2-L2-VL2-L3-VL1-L4-CL-L5-CH1-Fc and the second polypeptide has a structure represented by VL3-CH1-L6-VH3-CL-Fe. In some aspects, the first polypeptide has a structure represented by VL1-VL2-VH2-VH1-CH1-Fc; VH-VH2-VL2-VL1-CH1-Fc; VL1-VL2-VH2-VH1-CL-Fc; VH1-VH2-VL2-VL1-CL-Fc; VL1-VL2-VH2-VH1-CH1-CL-Fc; VH1-VH2-VL2-VL1-CH1-CL-Fc; VL1-VL2-VH2-VH1-CL-CH1-Fc; VH1-VH2-VL2-VL1-CL-CH1-Fc; VL1-L1-VL2-L2-VH2-L3-VH1-L4-CH1-Fc; VH1-L1-VH2-L2-VL2-L3-VL1-L4-CH1-Fc; VL1-L1-VL2-L2-VH2-L3-VH1-L4-CL-Fc; VH1-L1-VH2-L2-VL2-L3-VL1-L4-CL-Fc; VL1-L1-VL2-L2-VH2-L3-VH1-L4-CH1-L5-CL-Fc; VH1-L1-VH2-L2-VL2-L3-VL1-L4-CH1-L5-CL-Fc; VL1-L1-VL2-L2-VH2-L3-VH1-L4-CL-L5-CH1-Fc; or VH1-L1-VH2-L2-VL2-L3-VL1-L4-CL-L5-CH1-Fc and the second polypeptide has a structure represented by VH3-CH1-L6-VL3-CL-Fc. In some aspects, the first polypeptide has a structure represented by VL1-VL2-VH2-VH1-CH1-Fc; VH1-VH2-VL2-VL1-CH1-Fc; VL1-VL2-VH2-VH1-CL-Fc; VH1-VH2-VL2-VL1-CL-Fc; VL1-VL2-VH2-VH1-CH1-CL-Fc; VH1-VH2-VL2-VL1-CH1-CL-Fc; VL1-VL2-VH2-VH1-CL-CH1-Fc; VH1-VH2-VL2-VL1-CL-CH1-Fc; VL1-L1-VL2-L2-VH2-L3-VH1-L4-CH1-Fc; VH1-L1-VH2-L2-VL2-L3-VL1-L4-CH1-Fc; VL1-L1-VL2-L2-VH2-L3-VH1-L4-CL-Fc; VH1-L1-VH2-L2-VL2-L3-VL1-L4-CL-Fc; VL1-L1-VL2-L2-VH2-L3-VH1-L4-CH1-L5-CL-Fc; VH1-L1-VH2-L2-VL2-L3-VL1-L4-CH-L5-CL-Fc; VL1-L1-VL2-L2-VH2-L3-VH1-L4-CL-L5-CH1-Fc; or VH1-L1-VH2-L2-VL2-L3-VL1-L4-CL-L5-CH1-Fc and the second polypeptide has a structure represented by VH3-CL-L6-VL3-CH1-Fc. The VL1, VL2, VL3, VH1, VH2, and/or VH3 may specifically bind to A2AR, APRIL, ATPDase, BAFF, BAFFR, BCMA, BlyS, BTK, BTLA, B7DC, B7H1, B7H2, B7H3, B7H4, B7H5, B7H6, B7H7, B7RP1, B7-4, C3, C5, CCL2, CCL3, CCL4, CCL5, CCL7, CCL8, CCL11, CCL15, CCL17, CCL19, CCL20, CCL21, CCL25 CCR3, CCR4, CD3, CD19, CD20, CD24, CD27, CD28, CD38, CD39, CD40, CD40L, CD47, CD52, CD70, CD80, CD86, CD123, CD133, CD137, CD137L, CD160, CD272, CEACAM5, CLEC9, CLEC91, CRTH2, CSF-1, CSF-2, CSF-3, CXCL1, CXCL2, CXCL4, CXCL12, CXCL13, CXCR3, cMet, CTLA4, DLL3, DNGR-1, E-cadherin, EGFR, ENTPD1, EpCAM, FCER1, FCER1A, FCER2, FGFR, FLAP, FOLH1, Gi24, GITR, GITRL, GPR5, HER2, HER3, ICOSL, ICOS, HHLA2, HMGB1, HVEM, IDO, IFNa, IgE, IGF1R, IL2Rbeta, ILL, IL1A, IL1B, IL1F10, IL2, IL4, IL4Ra, IL5, IL5R, IL6, IL7, IL7Ra, IL8, IL9, IL9R, IL10, rhIL10, IL12, IL13, IL13Ra1, IL13Ra2, 1L15, IL17, IL17Rb, IL18, IL22, IL23, IL25, IL7, IL33, IL35, ITGB4, ITK, KIR, LAG3, LAMP1, leptin, LPFS2, MHC class II, MUC-1, MUC-16, NCR3LG1, NKG2D, NKp46, NTPDase-1, OX40, OX40L, PD-1, PD-L1, PD-L2, PROM1, S152, SIRPalpha, SISP1, SLC, SPG64, ST2, STEAP1, STEAP2, Syk kinase, STEAP1, TROP2, TACI, TDO, T14, TIGIT, TIM3, TLR, TLR2, TLR4, TLR5, TLR9, TMEF1, TNFa, TNFRSF7, Tp55, TREM1, TSLP, TSLPR, TWEAK, VEGF, VISTA, Vstm3, WUCAM, DLL4, TGFbeta, GP100, GPRC5D, CD30 or CD16A. For the avoidance of doubt, all the antigen binding polypeptide complex structures described herein can be combined with any one or more of the targets described herein. Any and all disclosure herein in relation to targets for antigen binding polypeptides of the invention is generally applicable, and applies equally and without reservation to each and every antigen binding polypeptide and antigen binding polypeptide complex described herein. For the avoidance of doubt, the VL1, VL2, VL3, VH1, VH2, and/or VH3 of each and every antigen binding polypeptide and antigen binding polypeptide complex described herein may independently bind to any one of said particularly preferred targets.

[0172] In other aspects, the invention is directed to an antigen binding polypeptide complex comprising a first polypeptide and a second polypeptide; wherein the first polypeptide has a structure represented by VL1-VL2-VH2-VH1; VH1-VH2-VL2-VL1; VL1-L1-VL2-L2-VH2-L3-VH1; VH1-L1-VH2-L2-VL2-L3-VL1; VL1-VL2-VH2-VH1-Fc; VH1-VH2-VL2-VL1-Fc; VL1-L1-VL2-L2-VH2-L3-VH1-Fc; VH1-L1-VH2-L2-VL2-L3-VL1-Fc; VL1-L1-VL2-L2-VH2-L3-VH1-L4-Fc; VH1-L1-VH2-L2-VL2-L3-VL1-L4-Fc; VL1-VL2-VH2-VH1-CH1; VH1-VH2-VL2-VL1-CH1; VL1-VL2-VH2-VH1-CL; VH1-VH2-VL2-VL1-CL; VL1-VL2-VH2-VH1-CH1-CL; VH1-VH2-VL2-VL1-CH1-CL; VL1-VL2-VH2-VH1-CL-CH1; VH1-VH2-VL2-VL1-CL-CH1; VL1-L1-VL2-L2-VH2-L3-VH1-L4-CH1; VH1-L1-VH2-L2-VL2-L3-VL1-L4-CH1; VL1-L1-VL2-L2-VH2-L3-VH1-L4-CL; VH1-L1-VH2-L2-VL2-L3-VL1-L4-CL; VL1-L1-VL2-L2-VH2-L3-VH1-L4-CH1-L5-CL; VH1-L1-VH2-L2-VL2-L3-VL1-L4-CH1-L5-CL; VL1-L1-VL2-L2-VH2-L3-VH1-L4-CL-L5-CH1; VH1-L1-VH2-L2-VL2-L3-VL1-L4-CL-L5-CH1; VL1-VL2-VH2-VH1-CH1-Fc; VH1-VH2-VL2-VL1-CH1-Fc; VL1-VL2-VH2-VH1-CL-Fc; VH1-VH2-VL2-VL1-CL-Fc; VL1-VL2-VH2-VH11-CH1-CL-Fc; VH1-VH2-VL2-VL1-CH1-CL-Fc; VL1-VL2-VH2-VH1-CL-CH1-Fc; VH1-VH2-VL2-VL1-CL-CH1-Fc; VL1-L1-VL2-L2-VH2-L3-VH1-L4-CH1-Fc; VH1-L1-VH2-L2-VL2-L3-VL1-L4-CH1-Fc; VL1-L1-VL2-L2-VH2-L3-VH1-L4-CL-Fc; VH1-L1-VH2-L2-VL2-L3-VL1-L4-CL-Fc; VL1-L1-VL2-L2-VH2-L3-VH1-L4-CH1-L5-CL-Fc; VH1-L1-VH2-L2-VL2-L3-VL1-L4-CH1-L5-CL-Fc; VL1-L1-VL2-L2-VH2-L3-VH1-L4-CL-L5-CH1-Fc; or VH1-L1-VH2-L2-VL2-L3-VL1-L4-CL-L5-CH1-Fc; wherein the second polypeptide has a structure represented by VL3-VH3; VH3-VL3; VL3-L4-VH3; VH3-L4-VL3; VL3-VH3-Fc; VH3-VL3-Fc; VL3-L4-VH3-Fc; VH3-L4-VL3-Fc; VL3-VH3-CH1; VH3-VL3-CH1; VL3-VH3-CL; VH3-VL3-CL; VL3-VH3-CH1-CL; VH3-VL3-CH1-CL; VL3-VH3-CL-CH1; VH3-VL3-CL-CH1; VL3-CL-VH3-CH1; VL3-CH1-VH3-CL; VH3-CH1-VL3-CL; VH3-CL-VL3-CH1; VL3-L6-VH3-L7-CH1; VH3-L6-VL3-L7-CH1; VL3-L6-VH3-L7-CL; VH3-L6-VL3-L7-CL; VL3-L6-VH3-L7-CH1-L8-CL; VH3-L6-VL3-L7-CH1-L8-CL; VL3-L6-VH3-L7-CL-L8-CH1; VH3-L6-VL3-L7-CL-L8-CH1; VL3-L6-CL-L7-VH3-L8-CH1; VL3-L6-CH1-L7-VH3-L8-CL; VH3-L6-CH1-L7-VL3-L8-CL; VH3-L6-CL-L7-VL3-L8-CH1; VL3-VH3-L6-CH1-CL; VH3-VL3-L6-CH1-CL; VL3-VH3-L6-CL-CH1; VH3-VL3-L6-CL-CH1; VL3-CL-L6-VH3-CH1; VL3-CH1-L6-VH3-CL; VH3-CH1-L6-VL3-CL; VH3-CL-L6-VL3-CH1; VL3-VH3-CH1-Fc; VH3-VL3-CH1-Fc; VL3-VH3-CL-Fc; VH3-VL3-CL-Fc; VL3-VH3-CH1-CL-Fc; VH3-VL3-CH1-CL-Fc; VL3-VH3-CL-CH1-Fc; VH3-VL3-CL-CH1-Fc; VL3-CL-VH3-CH1-Fc; VL3-CH1-VH3-CL-Fc; VH3-CH1-VL3-CL-Fc; VH3-CL-VL3-CH1-Fc; VL3-L6-VH3-L7-CH1-Fc; VH3-L6-VL3-L7-CH1-Fe; VL3-L6-VH3-L7-CL-Fc; VH3-L6-VL3-L7-CL-Fc; VL3-L6-VH3-L7-CH1-L8-CL-Fc; VH3-L6-VL3-L7-CH1-L8-CL-Fc; VL3-L6-VH3-L7-CL-L8-CH1-Fc; VH3-L6-VL3-L7-CL-L8-CH1-Fc; VL3-L6-CL-L7-VH3-L8-CH1-Fc; VL3-L6-CH1-L7-VH3-L8-CL-Fc; VH3-L6-CH1-L7-VL3-L8-CL-Fc; VH3-L6-CL-L7-VL3-L8-CH1-Fc; VL3-VH3-L6-CH1-CL-Fc; VH3-VL3-L6-CH1-CL-Fc; VL3-VH3-L6-CL-CH1-Fc; VH3-VL3-L6-CL-CH1-Fc; VL3-CL-L6-VH3-CH1-Fc; VL3-CH1-L6-VH3-CL-Fc; VH3-CH1-L6-VL3-CL-Fc; or VH3-CL-L6-VL3-CH1-Fc; wherein VL1 is a first immunoglobulin light chain variable region that specifically binds to A2AR, APRIL, ATPDase, BAFF, BAFFR, BCMA, BlyS, BTK, BTLA, B7DC, B7H1, B7H2, B7H3, B7H4, B7H5, B7H6, B7H7, B7RP1, B7-4, C3, C5, CCL2, CCL3, CCL4, CCL5, CCL7, CCL8, CCL11, CCL15, CCL17, CCL19, CCL20, CCL21, CCL25 CCR3, CCR4, CD3, CD19, CD20, CD24, CD27, CD28, CD38, CD39, CD40, CD40L, CD47, CD52, CD70, CD80, CD86, CD123, CD133, CD137, CD137L, CD160, CD272, CEACAM5, CLEC9, CLEC91, CRTH2, CSF-1, CSF-2, CSF-3, CXCL1, CXCL2, CXCL4, CXCL12, CXCL13, CXCR3, cMet, CTLA4, DLL3, DNGR-1, E-cadherin, EGFR, ENTPD1, EpCAM, FCER1, FCER1A, FCER2, FGFR, FLAP, FOLH1, Gi24, GITR, GITRL, GPR5, HER2, HER3, ICOSL, ICOS, HHLA2, HMGB1, HVEM, IDO, IFNa, IgE, IGF1R, IL2Rbeta, IL1, IL1A, IL11, IL1F10, IL2, IL4, IL4Ra, IL5, IL5R, IL6, IL7, IL7Ra, IL8, IL9, IL9R, IL10, rhIL10, IL12, IL13, IL13Ra1, IL13Ra2, IL15, IL17, IL17Rb, IL18, IL22, IL23, IL25, IL7, IL33, IL35, ITGB4, ITK, KIR, LAG3, LAMP1, leptin, LPFS2, MHC class II, MUC-1, MUC-16, NCR3LG1, NKG2D, NKp46, NTPDase-1, OX40, OX40L, PD-1, PD-L1, PD-L2, PROM1, S1S2, SIRPalpha, SISP1, SLC, SPG64, ST2, STEAP1, STEAP2, Syk kinase, STEAP1, TROP2, TACI, TDO, T14, TIGIT, TIM3, TLR, TLR2, TLR4, TLR5, TLR9, TMEF1, TNFa, TNFRSF7, Tp55, TREM1, TSLP, TSLPR, TWEAK, VEGF, VISTA, Vstm3, WUCAM, DLL4, TGFbeta, GP100, GPRC5D, CD30 or CD16A; VL2 is a second immunoglobulin light chain variable region that specifically binds to A2AR, APRIL, ATPDase, BAFF, BAFFR, BCMA, BlyS, BTK, BTLA, B7DC, B7H1, B7H2, B7H3, B7H4, B7H5, B7H6, B7H7, B7RP1, B7-4, C3, C5, CCL2, CCL3, CCL4, CCL5, CCL7, CCL8, CCL11, CCL15, CCL17, CCL19, CCL20, CCL21, CCL25 CCR3, CCR4, CD3, CD19, CD20, CD24, CD27, CD28, CD38, CD39, CD40, CD40L, CD47, CD52, CD70, CD80, CD86, CD123, CD133, CD137, CD137L, CD160, CD272, CEACAM5, CLEC9, CLEC91, CRTH2, CSF-1, CSF-2, CSF-3, CXCL1, CXCL2, CXCL4, CXCL12, CXCL13, CXCR3, cMet, CTLA4, DLL3, DNGR-1, E-cadherin, EGFR, ENTPD1, EpCAM, FCER1, FCER1A, FCER2, FGFR, FLAP, FOLH1, Gi24, GITR, GITRL, GPR5, HER2, HER3, ICOSL, ICOS, HHLA2, HMGB1, HVEM, IDO, IFNa, IgE, IGF1R, IL2Rbeta, IL1, IL1A, IL1B, IL1F10, IL2, IL4, IL4Ra, IL5, IL5R, IL6, IL7, IL7Ra, IL8, I9, IL9R, IL10, rhIL10, IL12, IL13, IL13Ra1, IL13Ra2, IL15, IL17, IL17Rb, IL18, IL22, IL23, IL25, IL7, IL33, IL35, ITGB4, ITK, KIR, LAG3, LAMP1, leptin, LPFS2, MHC class II, MUC-1, MUC-16, NCR3LG1, NKG2D, NKp46, NTPDase-1, OX40, OX40L, PD-1, PD-L1, PD-L2, PROM1, S152, SIRPalpha, SISP1, SLC, SPG64, ST2, STEAP1, STEAP2, Syk kinase, STEAP1, TROP2, TACI, TDO, T14, TIGIT, TIM3, TLR, TLR2, TLR4, TLR5, TLR9, TMEF1, TNFa, TNFRSF7, Tp55, TREM1, TSLP, TSLPR, TWEAK, VEGF, VISTA, Vstm3, WUCAM, DLL4, TGFbeta, GP100, GPRC5D, CD30 or CD16A; VL3 is a third immunoglobulin light chain variable region that specifically binds to A2AR, APRIL, ATPDase, BAFF, BAFFR, BCMA, BlyS, BTK, BTLA, B7DC, B7H1, B7H2, B7H3, B7H4, B7H5, B7H6, B7H7, B7RP1, B7-4, C3, C5, CCL2, CCL3, CCL4, CCL5, CCL7, CCL8, CCL11, CCL15, CCL17, CCL19, CCL20, CCL21, CCL25 CCR3, CCR4, CD3, CD19, CD20, CD24, CD27, CD28, CD38, CD39, CD40, CD40L, CD47, CD52, CD70, CD80, CD86, CD123, CD133, CD137, CD137L, CD160, CD272, CEACAM5, CLEC9, CLEC91, CRTH2, CSF-1, CSF-2, CSF-3, CXCL1, CXCL2, CXCL4, CXCL12, CXCL13, CXCR3, cMet, CTLA4, DLL3, DNGR-1, E-cadherin, EGFR, ENTPD1, EpCAM, FCER1, FCER1A, FCER2, FGFR, FLAP, FOLH1, Gi24, GITR, GITRL, GPR5, HER2, HER3, ICOSL, ICOS, HHLA2, HMGB1, HVEM, IDO, IFNa, IgE, IGF1R, IL2Rbeta, IL1, IL1A, IL1B, IL1F10, IL2, IL4, IL4Ra, IL5, IL5R, IL6, IL7, IL7Ra, IL8, IL9, IL9R, IL10, rhIL10, IL12, IL13, IL13Ra1, IL13Ra2, IL15, IL17, IL17Rb, IL18, IL22, IL23, IL25, IL7, IL33, IL35, ITGB4, ITK, KIR, LAG3, LAMP1, leptin, LPFS2, MHC class II, MUC-1, MUC-16, NCR3LG1, NKG2D, NKp46, NTPDase-1, OX40, OX40L, PD-1, PD-L1, PD-L2, PROM1, S152, SIRPalpha, SISP1, SLC, SPG64, ST2, STEAP1, STEAP2, Syk kinase, STEAP1, TROP2, TACI, TDO, T14, TIGIT, TIM3, TLR, TLR2, TLR4, TLR5, TLR9, TMEF1, TNFa, TNFRSF7, Tp55, TREM1, TSLP, TSLPR, TWEAK, VEGF, VISTA, Vstm3, WUCAM, DLL4, TGFbeta, GP100, GPRC5D, CD30 or CD16A; VH1 is a first immunoglobulin heavy chain variable region that specifically binds to A2AR, APRIL, ATPDase, BAFF, BAFFR, BCMA, BlyS, BTK, BTLA, B7DC, B7H1, B7H2, B7H3, B7H4, B7H5, B7H6, B7H7, B7RP1, B7-4, C3, C5, CCL2, CCL3, CCL4, CCL5, CCL7, CCL8, CCL11, CCL15, CCL17, CCL19, CCL20, CCL21, CCL25 CCR3, CCR4, CD3, CD19, CD20, CD24, CD27, CD28, CD38, CD39, CD40, CD40L, CD47, CD52, CD70, CD80, CD86, CD123, CD133, CD137, CD137L, CD160, CD272, CEACAM5, CLEC9, CLEC91, CRTH2, CSF-1, CSF-2, CSF-3, CXCL1, CXCL2, CXCL4, CXCL12, CXCL13, CXCR3, cMet, CTLA4, DLL3, DNGR-1, E-cadherin, EGFR, ENTPD1, EpCAM, FCER1, FCER1A, FCER2, FGFR, FLAP, FOLH1, Gi24, GITR, GITRL, GPR5, HER2, HER3, ICOSL, ICOS, HHLA2, HMGB1, HVEM, IDO, IFNa, IgE, IGF1R, IL2Rbeta, IL1, IL1A, IL1B, IL1F10, IL2, IL4, IL4Ra, IL5, IL5R, IL6, IL7, IL7Ra, IL8, IL9, IL9R, IL10, rhIL10, IL12, IL13, R13Ra1, IL13Ra2, IL15, IL17, IL17Rb, IL18, IL22, IL23, IL25, IL7, IL33, IL35, ITGB4, ITK, KIR, LAG3, LAMP1, leptin, LPFS2, MHC class II, MUC-1, MUC-16, NCR3LG1, NKG2D, NKp46, NTPDase-1, OX40, OX40L, PD-1, PD-L1, PD-L2, PROM1, S152, SIRPalpha, SISP1, SLC, SPG64, ST2, STEAP1, STEAP2, Syk kinase, STEAP1, TROP2, TACI, TDO, T14, TIGIT, TIM3, TLR, TLR2, TLR4, TLR5, TLR9, TMEF1, TNFa, TNFRSF7, Tp55, TREM1, TSLP, TSLPR, TWEAK, VEGF, VISTA, Vstm3, WUCAM, DLL4, TGFbeta, GP100, GPRC5D, CD30 or CD16A; VH2 is a second immunoglobulin heavy chain variable region that specifically binds to A2AR, APRIL, ATPDase, BAFF, BAFFR, BCMA, BlyS, BTK, BTLA, B7DC, B7H1, B7H2, B7H3, B7H4, B7H5, B7H6, B7H7, B7RP1, B7-4, C3, C5, CCL2, CCL3, CCL4, CCL5, CCL7, CCL8, CCL11, CCL15, CCL17, CCL19, CCL20, CCL21, CCL25 CCR3, CCR4, CD3, CD19, CD20, CD24, CD27, CD28, CD38, CD39, CD40, CD40L, CD47, CD52, CD70, CD80, CD86, CD123, CD133, CD137, CD137L, CD160, CD272, CEACAM5, CLEC9, CLEC91, CRTH2, CSF-1, CSF-2, CSF-3, CXCL1, CXCL2, CXCL4, CXCL12, CXCL13, CXCR3, cMet, CTLA4, DLL3, DNGR-1, E-cadherin, EGFR, ENTPD1, EpCAM, FCER1, FCER1A, FCER2, FGFR, FLAP, FOLH1, Gi24, GITR, GITRL, GPR5, HER2, HER3, ICOSL, ICOS, HHLA2, HMGB1, HVEM, IDO, IFNa, IgE, IGF1R, IL2Rbeta, IL1, IL1A, IL1B, IL1F10, IL2, IL4, IL4Ra, IL5, IL5R, IL6, IL7, IL7Ra, IL8, IL9, IL9R, IL10, rhIL10, IL12, IL13, IL13Ra1, IL13Ra2, IL15, IR17, IL17Rb, IL18, IR22, IL23, IL25, IL7, IL33, IL35, ITGB4, ITK, KIR, LAG3, LAMP1, leptin, LPFS2, MHC class II, MUC-1, MUC-16, NCR3LG1, NKG2D, NKp46, NTPDase-1, OX40, OX40L, PD-1, PD-L1, PD-L2, PROM1, S152, SIRPalpha, SISP1, SLC, SPG64, ST2, STEAP1, STEAP2, Syk kinase, STEAP1, TROP2, TACI, TDO, T14, TIGIT, TIM3, TLR, TLR2, TLR4, TLR5, TLR9, TMEF1, TNFa, TNFRSF7, Tp55, TREM1, TSLP, TSLPR, TWEAK, VEGF, VISTA, Vstm3, WUCAM, DLL4, TGFbeta, GP100, GPRC5D, CD30 or CD16A; VH3 is a third immunoglobulin heavy chain variable region that specifically binds to A2AR, APRIL, ATPDase, BAFF, BAFFR, BCMA, BlyS, BTK, BTLA, B7DC, B7H1, B7H2, B7H3, B7H4, B7H5, B7H6, B7H7, B7RP1, B7-4, C3, C5, CCL2, CCL3, CCL4, CCL5, CCL7, CCL8, CCL11, CCL15, CCL17, CCL19, CCL20, CCL21, CCL25 CCR3, CCR4, CD3, CD19, CD20, CD24, CD27, CD28, CD38, CD39, CD40, CD40L, CD47, CD52, CD70, CD80, CD86, CD123, CD133, CD137, CD137L, CD160, CD272, CEACAM5, CLEC9, CLEC91, CRTH2, CSF-1, CSF-2, CSF-3, CXCL1, CXCL2, CXCL4, CXCL12, CXCL13, CXCR3, cMet, CTLA4, DLL3, DNGR-1, E-cadherin, EGFR, ENTPD1, EpCAM, FCER1, FCER1A, FCER2, FGFR, FLAP, FOLH1, Gi24, GITR, GITRL, GPR5, HER2, HER3, ICOSL, ICOS, HHLA2, HMGB1, HVEM, IDO, IFNa, IgE, IGF1R, IL2Rbeta, IL1, IL1A, IL1B, IL1F10, IL2, IL4, IL4Ra, IL5, IR, IL6, IL7, IL7Ra, IL8, IL9, IL9R, IL10, rhIL10, IL12, IL13, R13Ra1, IL13Ra2, IL15, IL17, IL17Rb, IL18, IL22, IL23, IL25, IL7, IL33, IL35, ITGB4, ITK, KIR, LAG3, LAMP1, leptin, LPFS2, MHC class II, MUC-1, MUC-16, NCR3LG1, NKG2D, NKp46, NTPDase-1, OX40, OX40L, PD-1, PD-L1, PD-L2, PROM1, S152, SIRPalpha, SISP1, SLC, SPG64, ST2, STEAP1, STEAP2, Syk kinase, STEAP1, TROP2, TACI, TDO, T14, TIGIT, TIM3, TLR, TLR2, TLR4, TLR5, TLR9, TMEF1, TNFa, TNFRSF7, Tp55, TREM1, TSLP, TSLPR, TWEAK, VEGF, VISTA, Vstm3, WUCAM, DLL4, TGFbeta, GP100, GPRC5D, CD30 or CD16A; Fe is a region comprising an immunoglobulin heavy chain constant region 2 (CH2), an immunoglobulin heavy chain constant region 3 (CH3), and optionally, an immunoglobulin hinge; CH1 is an immunoglobulin heavy chain constant region 1; CL is an immunoglobulin light chain constant region; and L1, L2, L3, L4, L5, L6, L7 and L8 are amino acid linkers. In some aspects, the first polypeptide has a structure represented by VL1-VL2-VH2-VH1 and the second polypeptide has a structure represented by VL3-VH3; VH3-VL3; VL3-L4-VH3; VH3-L4-VL3; VL3-VH3-Fc; VH3-VL3-Fc; VL3-L4-VH3-Fc; VH3-L4-VL3-Fc; VL3-VH3-CH1; VH3-VL3-CH1; VL3-VH3-CL; VH3-VL3-CL; VL3-VH3-CH1-CL; VH3-VL3-CH1-CL; VL3-VH3-CL-CH1; VH3-VL3-CL-CH1; VL3-CL-VH3-CH1; VL3-CH1-VH3-CL; VH3-CH1-VL3-CL; VH3-CL-VL3-CH1; VL3-L6-VH3-L7-CH1; VH3-L6-VL3-L7-CH1; VL3-L6-VH3-L7-CL; VH3-L6-VL3-L7-CL; VL3-L6-VH3-L7-CH1-L8-CL; VH3-L6-VL3-L7-CH1-L8-CL; VL3-L6-VH3-L7-CL-L8-CH1; VH3-L6-VL3-L7-CL-L8-CH1; VL3-L6-CL-L7-VH3-L8-CH1; VL3-L6-CH1-L7-VH3-L8-CL; VH3-L6-CH1-L7-VL3-L8-CL; VH3-L6-CL-L7-VL3-L8-CH1; VL3-VH3-L6-CH1-CL; VH3-VL3-L6-CH1-CL; VL3-VH3-L6-CL-CH1; VH3-VL3-L6-CL-CH1; VL3-CL-L6-VH3-CH1; VL3-CH1-L6-VH3-CL; VH3-CH1-L6-VL3-CL; VH3-CL-L6-VL3-CH1; VL3-VH3-CH1-Fc; VH3-VL3-CH1-Fc; VL3-VH3-CL-Fc; VH3-VL3-CL-Fc; VL3-VH3-CH1-CL-Fc; VH3-VL3-CH1-CL-Fc; VL3-VH3-CL-CH1-Fc; VH3-VL3-CL-CH1-Fc; VL3-CL-VH3-CH1-Fc; VL3-CH1-VH3-CL-Fc; VH3-CH1-VL3-CL-Fc; VH3-CL-VL3-CH1-Fc; VL3-L6-VH3-L7-CH1-Fc; VH3-L6-VL3-L7-CH1-Fc; VL3-L6-VH3-L7-CL-Fc; VH3-L6-VL3-L7-CL-Fc; VL3-L6-VH3-L7-CH1-L8-CL-Fc; VH3-L6-VL3-L7-CH1-L8-CL-Fc; VL3-L6-VH3-L7-CL-L8-CH1-Fc; VH3-L6-VL3-L7-CL-L8-CH1-Fc; VL3-L6-CL-L7-VH3-L8-CH1-Fc; VL3-L6-CH1-L7-VH3-L8-CL-Fc; VH3-L6-CH1-L7-VL3-L8-CL-Fc; VH3-L6-CL-L7-VL3-L8-CH1-Fc; VL3-VH3-L6-CH1-CL-Fc; VH3-VL3-L6-CH1-CL-Fc; VL3-VH3-L6-CL-CH1-Fc; VH3-VL3-L6-CL-CH1-Fc; VL3-CL-L6-VH3-CH1-Fc; VL3-CH1-L6-VH3-CL-Fc; VH3-CH1-L6-VL3-CL-Fc; or VH3-CL-L6-VL3-CH1-Fc. In some aspects, the first polypeptide has a structure represented by VH1-VH2-VL2-VL1 and the second polypeptide has a structure represented by VL3-VH3; VH3-VL3; VL3-L4-VH3; VH3-L4-VL3; VL3-VH3-Fc; VH3-VL3-Fc; VL3-L4-VH3-Fc; VH3-L4-VL3-Fc; VL3-VH3-CH1; VH3-VL3-CH1; VL3-VH3-CL; VH3-VL3-CL; VL3-VH3-CH1-CL; VH3-VL3-CH1-CL; VL3-VH3-CL-CH1; VH3-VL3-CL-CH1; VL3-CL-VH3-CH1; VL3-CH1-VH3-CL; VH3-CH1-VL3-CL; VH3-CL-VL3-CH1; VL3-L6-VH3-L7-CH1; VH3-L6-VL3-L7-CH1; VL3-L6-VH3-L7-CL; VH3-L6-VL3-L7-CL; VL3-L6-VH3-L7-CH1-L8-CL; VH3-L6-VL3-L7-CH1-L8-CL; VL3-L6-VH3-L7-CL-L8-CH1; VH3-L6-VL3-L7-CL-L8-CH1; VL3-L6-CL-L7-VH3-L8-CH1; VL3-L6-CH1-L7-VH3-L8-CL; VH3-L6-CH1-L7-VL3-L8-CL; VH3-L6-CL-L7-VL3-L8-CH1; VL3-VH3-L6-CH1-CL; VH3-VL3-L6-CH1-CL; VL3-VH3-L6-CL-CH1; VH3-VL3-L6-CL-CH1; VL3-CL-L6-VH3-CH1; VL3-CH1-L6-VH3-CL; VH3-CH1-L6-VL3-CL; VH3-CL-L6-VL3-CH1; VL3-VH3-CH1-Fc; VH3-VL3-CH1-Fc; VL3-VH3-CL-Fc; VH3-VL3-CL-Fc; VL3-VH3-CH1-CL-Fc; VH3-VL3-CH1-CL-Fc; VL3-VH3-CL-CH1-Fc; VH3-VL3-CL-CH1-Fc; VL3-CL-VH3-CH1-Fc; VL3-CH1-VH3-CL-Fc; VH3-CH1-VL3-CL-Fc; VH3-CL-VL3-CH1-Fc; VL3-L6-VH3-L7-CH1-Fc; VH3-L6-VL3-L7-CH1-Fc; VL3-L6-VH3-L7-CL-Fc; VH3-L6-VL3-L7-CL-Fc; VL3-L6-VH3-L7-CH1-L8-CL-Fc; VH3-L6-VL3-L7-CH1-L8-CL-Fc; VL3-L6-VH3-L7-CL-L8-CH1-Fc; VH3-L6-VL3-L7-CL-L8-CH1-Fc; VL3-L6-CL-L7-VH3-L8-CH1-Fc; VL3-L6-CH1-L7-VH3-L8-CL-Fc; VH3-L6-CH1-L7-VL3-L8-CL-Fc; VH3-L6-CL-L7-VL3-L8-CH1-Fc; VL3-VH3-L6-CH1-CL-Fc; VH3-VL3-L6-CH1-CL-Fc; VL3-VH3-L6-CL-CH1-Fc; VH3-VL3-L6-CL-CH1-Fc; VL3-CL-L6-VH3-CH1-Fc; VL3-CH1-L6-VH3-CL-Fc; VH3-CH1-L6-VL3-CL-Fc; or VH3-CL-L6-VL3-CH1-Fc. In some aspects, the first polypeptide has a structure represented by VL1-L1-VL2-L2-VH2-L3-VH1 and the second polypeptide has a structure represented by VL3-VH3; VH3-VL3; VL3-L4-VH3; VH3-L4-VL3; VL3-VH3-Fc; VH3-VL3-Fc; VL3-L4-VH3-Fc; VH3-L4-VL3-Fc; VL3-VH3-CH1; VH3-VL3-CH1; VL3-VH3-CL; VH3-VL3-CL; VL3-VH3-CH1-CL; VH3-VL3-CH1-CL; VL3-VH3-CL-CH1; VH3-VL3-CL-CH1; VL3-CL-VH3-CH1; VL3-CH1-VH3-CL; VH3-CH1-VL3-CL; VH3-CL-VL3-CH1; VL3-L6-VH3-L7-CH1; VH3-L6-VL3-L7-CH1; VL3-L6-VH3-L7-CL; VH3-L6-VL3-L7-CL; VL3-L6-VH3-L7-CH1-L8-CL; VH3-L6-VL3-L7-CH1-L8-CL; VL3-L6-VH3-L7-CL-L8-CH1; VH3-L6-VL3-L7-CL-L8-CH1; VL3-L6-CL-L7-VH3-L8-CH1; VL3-L6-CH1-L7-VH3-L8-CL; VH3-L6-CH1-L7-VL3-L8-CL; VH3-L6-CL-L7-VL3-L8-CH1; VL3-VH3-L6-CH1-CL; VH3-VL3-L6-CH1-CL; VL3-VH3-L6-CL-CH1; VH3-VL3-L6-CL-CH1; VL3-CL-L6-VH3-CH1; VL3-CH1-L6-VH3-CL; VH3-CH1-L6-VL3-CL; VH3-CL-L6-VL3-CH1; VL3-VH3-CH1-Fc; VH3-VL3-CH1-Fc; VL3-VH3-CL-Fc; VH3-VL3-CL-Fc; VL3-VH3-CH1-CL-Fc; VH3-VL3-CH1-CL-Fc; VL3-VH3-CL-CH1-Fc; VH3-VL3-CL-CH1-Fc; VL3-CL-VH3-CH1-Fc; VL3-CH1-VH3-CL-Fc; VH3-CH1-VL3-CL-Fc; VH3-CL-VL3-CH1-Fc; VL3-L6-VH3-L7-CH1-Fc; VH3-L6-VL3-L7-CH1-Fc; VL3-L6-VH3-L7-CL-Fc; VH3-L6-VL3-L7-CL-Fe; VL3-L6-VH3-L7-CH1-L8-CL-Fc; VH3-L6-VL3-L7-CH1-L8-CL-Fc; VL3-L6-VH3-L7-CL-L8-CH1-Fc; VH3-L6-VL3-L7-CL-L8-CH1-Fc; VL3-L6-CL-L7-VH3-L8-CH1-Fc; VL3-L6-CH1-L7-VH3-L8-CL-Fc; VH3-L6-CH1-L7-VL3-L8-CL-Fc; VH3-L6-CL-L7-VL3-L8-CH1-Fc; VL3-VH3-L6-CH1-CL-Fc; VH3-VL3-L6-CH1-CL-Fc; VL3-VH3-L6-CL-CH1-Fc; VH3-VL3-L6-CL-CH1-Fc; VL3-CL-L6-VH3-CH1-Fc; VL3-CH1-L6-VH3-CL-Fc; VH3-CH1-L6-VL3-CL-Fc; or VH3-CL-L6-VL3-CH1-Fc. In some aspects, the first polypeptide has a structure represented by VH1-L1-VH2-L2-VL2-L3-VL1 and the second polypeptide has a structure represented by VL3-VH3; VH3-VL3; VL3-L4-VH3; VH3-L4-VL3; VL3-VH3-Fc; VH3-VL3-Fc; VL3-L4-VH3-Fc; VH3-L4-VL3-Fc; VL3-VH3-CH1; VH3-VL3-CH1; VL3-VH3-CL; VH3-VL3-CL; VL3-VH3-CH1-CL; VH3-VL3-CH1-CL; VL3-VH3-CL-CH1; VH3-VL3-CL-CH1; VL3-CL-VH3-CH1; VL3-CH1-VH3-CL; VH3-CH1-VL3-CL; VH3-CL-VL3-CH1; VL3-L6-VH3-L7-CH1; VH3-L6-VL3-L7-CH1; VL3-L6-VH3-L7-CL; VH3-L6-VL3-L7-CL; VL3-L6-VH3-L7-CH1-L8-CL; VH3-L6-VL3-L7-CH1-L8-CL; VL3-L6-VH3-L7-CL-L8-CH1; VH3-L6-VL3-L7-CL-L8-CH1; VL3-L6-CL-L7-VH3-L8-CH1; VL3-L6-CH1-L7-VH3-L8-CL; VH3-L6-CH1-L7-VL3-L8-CL; VH3-L6-CL-L7-VL3-L8-CH1; VL3-VH3-L6-CH1-CL; VH3-VL3-L6-CH1-CL; VL3-VH3-L6-CL-CH1; VH3-VL3-L6-CL-CH1; VL3-CL-L6-VH3-CH1; VL3-CH1-L6-VH3-CL; VH3-CH1-L6-VL3-CL; VH3-CL-L6-VL3-CH1; VL3-VH3-CH1-Fc; VH3-VL3-CH1-Fc; VL3-VH3-CL-Fc; VH3-VL3-CL-Fc; VL3-VH3-CH1-CL-Fc; VH3-VL3-CH1-CL-Fc; VL3-VH3-CL-CH1-Fc; VH3-VL3-CL-CH1-Fc; VL3-CL-VH3-CH1-Fc; VL3-CH1-VH3-CL-Fc; VH3-CH1-VL3-CL-Fc; VH3-CL-VL3-CH1-Fc; VL3-L6-VH3-L7-CH1-Fc; VH3-L6-VL3-L7-CH1-Fe; VL3-L6-VH3-L7-CL-Fc; VH3-L6-VL3-L7-CL-Fc; VL3-L6-VH3-L7-CH1-L8-CL-Fc; VH3-L6-VL3-L7-CH1-L8-CL-Fc; VL3-L6-VH3-L7-CL-L8-CH1-Fc; VH3-L6-VL3-L7-CL-L8-CH1-Fc; VL3-L6-CL-L7-VH3-L8-CH1-Fc; VL3-L6-CH1-L7-VH3-L8-CL-Fc; VH3-L6-CH1-L7-VL3-L8-CL-Fc; VH3-L6-CL-L7-VL3-L8-CH1-Fc; VL3-VH3-L6-CH1-CL-Fc; VH3-VL3-L6-CH1-CL-Fc; VL3-VH3-L6-CL-CH1-Fc; VH3-VL3-L6-CL-CH1-Fc; VL3-CL-L6-VH3-CH1-Fc; VL3-CH1-L6-VH3-CL-Fc; VH3-CH1-L6-VL3-CL-Fc; or VH3-CL-L6-VL3-CH1-Fe. In some aspects, the first polypeptide has a structure represented by VL1-VL2-VH2-VH1-Fc and the second polypeptide has a structure represented by VL3-VH3; VH3-VL3; VL3-L4-VH3; VH3-L4-VL3; VL3-VH3-Fc; VH3-VL3-Fc; VL3-L4-VH3-Fc; VH3-L4-VL3-Fc; VL3-VH3-CH1; VH3-VL3-CH1; VL3-VH3-CL; VH3-VL3-CL; VL3-VH3-CH1-CL; VH3-VL3-CH1-CL; VL3-VH3-CL-CH1; VH3-VL3-CL-CH1; VL3-CL-VH3-CH1; VL3-CH1-VH3-CL; VH3-CH1-VL3-CL; VH3-CL-VL3-CH1; VL3-L6-VH3-L7-CH1; VH3-L6-VL3-L7-CH1; VL3-L6-VH3-L7-CL; VH3-L6-VL3-L7-CL; VL3-L6-VH3-L7-CH1-L8-CL; VH3-L6-VL3-L7-CH1-L8-CL; VL3-L6-VH3-L7-CL-L8-CH1; VH3-L6-VL3-L7-CL-L8-CH1; VL3-L6-CL-L7-VH3-L8-CH1; VL3-L6-CH1-L7-VH3-L8-CL; VH3-L6-CH1-L7-VL3-L8-CL; VH3-L6-CL-L7-VL3-L8-CH1; VL3-VH3-L6-CH1-CL; VH3-VL3-L6-CH1-CL; VL3-VH3-L6-CL-CH1; VH3-VL3-L6-CL-CH1; VL3-CL-L6-VH3-CH1; VL3-CH1-L6-VH3-CL; VH3-CH1-L6-VL3-CL; VH3-CL-L6-VL3-CH1; VL3-VH3-CH1-Fc; VH3-VL3-CH1-Fc; VL3-VH3-CL-Fc; VH3-VL3-CL-Fc; VL3-VH3-CH1-CL-Fc; VH3-VL3-CH1-CL-Fc; VL3-VH3-CL-CH1-Fc; VH3-VL3-CL-CH1-Fc; VL3-CL-VH3-CH1-Fc; VL3-CH1-VH3-CL-Fc; VH3-CH1-VL3-CL-Fc; VH3-CL-VL3-CH1-Fc; VL3-L6-VH3-L7-CH1-Fc; VH3-L6-VL3-L7-CH1-Fc; VL3-L6-VH3-L7-CL-Fc; VH3-L6-VL3-L7-CL-Fe; VL3-L6-VH3-L7-CH1-L8-CL-Fc; VH3-L6-VL3-L7-CH1-L8-CL-Fc; VL3-L6-VH3-L7-CL-L8-CH1-Fc; VH3-L6-VL3-L7-CL-L8-CH1-Fc; VL3-L6-CL-L7-VH3-L8-CH1-Fc; VL3-L6-CH1-L7-VH3-L8-CL-Fc; VH3-L6-CH1-L7-VL3-L8-CL-Fc; VH3-L6-CL-L7-VL3-L8-CH1-Fc; VL3-VH3-L6-CH1-CL-Fc; VH3-VL3-L6-CH1-CL-Fc; VL3-VH3-L6-CL-CH1-Fc; VH3-VL3-L6-CL-CH1-Fc; VL3-CL-L6-VH3-CH1-Fc; VL3-CH1-L6-VH3-CL-Fc; VH3-CH1-L6-VL3-CL-Fc; or VH3-CL-L6-VL3-CH1-Fe. In some aspects, the first polypeptide has a structure represented by VH1-VH2-VL2-VL1-Fc and the second polypeptide has a structure represented by VL3-VH3; VH3-VL3; VL3-L4-VH3; VH3-L4-VL3; VL3-VH3-Fc; VH3-VL3-Fc; VL3-L4-VH3-Fc; VH3-L4-VL3-Fc; VL3-VH3-CH1; VH3-VL3-CH1; VL3-VH3-CL; VH3-VL3-CL; VL3-VH3-CH1-CL; VH3-VL3-CH1-CL; VL3-VH3-CL-CH1; VH3-VL3-CL-CH1; VL3-CL-VH3-CH1; VL3-CH1-VH3-CL; VH3-CH1-VL3-CL; VH3-CL-VL3-CH1; VL3-L6-VH3-L7-CH1; VH3-L6-VL3-L7-CH1; VL3-L6-VH3-L7-CL; VH3-L6-VL3-L7-CL; VL3-L6-VH3-L7-CH1-L8-CL; VH3-L6-VL3-L7-CH1-L8-CL; VL3-L6-VH3-L7-CL-L8-CH1; VH3-L6-VL3-L7-CL-L8-CH1; VL3-L6-CL-L7-VH3-L8-CH1; VL3-L6-CH1-L7-VH3-L8-CL; VH3-L6-CH1-L7-VL3-L8-CL; VH3-L6-CL-L7-VL3-L8-CH1; VL3-VH3-L6-CH1-CL; VH3-VL3-L6-CH1-CL; VL3-VH3-L6-CL-CH1; VH3-VL3-L6-CL-CH1; VL3-CL-L6-VH3-CH1; VL3-CH1-L6-VH3-CL; VH3-CH1-L6-VL3-CL; VH3-CL-L6-VL3-CH1; VL3-VH3-CH1-Fc; VH3-VL3-CH1-Fc; VL3-VH3-CL-Fc; VH3-VL3-CL-Fc; VL3-VH3-CH1-CL-Fc; VH3-VL3-CH1-CL-Fc; VL3-VH3-CL-CH1-Fc; VH3-VL3-CL-CH1-Fc; VL3-CL-VH3-CH1-Fc; VL3-CH1-VH3-CL-Fc; VH3-CH1-VL3-CL-Fc; VH3-CL-VL3-CH1-Fc; VL3-L6-VH3-L7-CH1-Fc; VH3-L6-VL3-L7-CH1-Fc; VL3-L6-VH3-L7-CL-Fc; VH3-L6-VL3-L7-CL-Fc; VL3-L6-VH3-L7-CH1-L8-CL-Fc; VH3-L6-VL3-L7-CH1-L8-CL-Fe; VL3-L6-VH3-L7-CL-L8-CH1-Fc; VH3-L6-VL3-L7-CL-L8-CH1-Fc; VL3-L6-CL-L7-VH3-L8-CH1-Fc; VL3-L6-CH1-L7-VH3-L8-CL-Fc; VH3-L6-CH1-L7-VL3-L8-CL-Fc; VH3-L6-CL-L7-VL3-L8-CH1-Fc; VL3-VH3-L6-CH1-CL-Fe; VH3-VL3-L6-CH1-CL-Fc; VL3-VH3-L6-CL-CH1-Fc; VH3-VL3-L6-CL-CH1-Fc; VL3-CL-L6-VH3-CH1-Fc; VL3-CH1-L6-VH3-CL-Fc; VH3-CH1-L6-VL3-CL-Fc; or VH3-CL-L6-VL3-CH1-Fc. In some aspects, the first polypeptide has a structure represented by VL1-L1-VL2-L2-VH2-L3-VH1-Fc and the second polypeptide has a structure represented by VL3-VH3; VH3-VL3; VL3-L4-VH3; VH3-L4-VL3; VL3-VH3-Fc; VH3-VL3-Fc; VL3-L4-VH3-Fc; VH3-L4-VL3-Fc; VL3-VH3-CH1; VH3-VL3-CH1; VL3-VH3-CL; VH3-VL3-CL; VL3-VH3-CH1-CL; VH3-VL3-CH1-CL; VL3-VH3-CL-CH1; VH3-VL3-CL-CH1; VL3-CL-VH3-CH1; VL3-CH1-VH3-CL; VH3-CH1-VL3-CL; VH3-CL-VL3-CH1; VL3-L6-VH3-L7-CH1; VH3-L6-VL3-L7-CH1; VL3-L6-VH3-L7-CL; VH3-L6-VL3-L7-CL; VL3-L6-VH3-L7-CH1-L8-CL; VH3-L6-VL3-L7-CH1-L8-CL; VL3-L6-VH3-L7-CL-L8-CH1; VH3-L6-VL3-L7-CL-L8-CH1; VL3-L6-CL-L7-VH3-L8-CH1; VL3-L6-CH1-L7-VH3-L8-CL; VH3-L6-CH1-L7-VL3-L8-CL; VH3-L6-CL-L7-VL3-L8-CH1; VL3-VH3-L6-CH1-CL; VH3-VL3-L6-CH1-CL; VL3-VH3-L6-CL-CH1; VH3-VL3-L6-CL-CH1; VL3-CL-L6-VH3-CH1; VL3-CH1-L6-VH3-CL; VH3-CH1-L6-VL3-CL; VH3-CL-L6-VL3-CH1; VL3-VH3-CH1-Fc; VH3-VL3-CH1-Fc; VL3-VH3-CL-Fc; VH3-VL3-CL-Fc; VL3-VH3-CH1-CL-Fc; VH3-VL3-CH1-CL-Fc; VL3-VH3-CL-CH1-Fc; VH3-VL3-CL-CH1-Fc; VL3-CL-VH3-CH1-Fc; VL3-CH1-VH3-CL-Fc; VH3-CH1-VL3-CL-Fc; VH3-CL-VL3-CH1-Fc; VL3-L6-VH3-L7-CH1-Fc; VH3-L6-VL3-L7-CH1-Fc; VL3-L6-VH3-L7-CL-Fc; VH3-L6-VL3-L7-CL-Fe; VL3-L6-VH3-L7-CH1-L8-CL-Fc; VH3-L6-VL3-L7-CH1-L8-CL-Fc; VL3-L6-VH3-L7-CL-L8-CH1-Fc; VH3-L6-VL3-L7-CL-L8-CH1-Fc; VL3-L6-CL-L7-VH3-L8-CH1-Fc; VL3-L6-CH1-L7-VH3-L8-CL-Fc; VH3-L6-CH1-L7-VL3-L8-CL-Fc; VH3-L6-CL-L7-VL3-L8-CH1-Fc; VL3-VH3-L6-CH1-CL-Fc; VH3-VL3-L6-CH1-CL-Fc; VL3-VH3-L6-CL-CH1-Fc; VH3-VL3-L6-CL-CH1-Fc; VL3-CL-L6-VH3-CH1-Fc; VL3-CH1-L6-VH3-CL-Fc; VH3-CH1-L6-VL3-CL-Fc; or VH3-CL-L6-VL3-CH1-Fc. In some aspects, the first polypeptide has a structure represented by VH1-L1-VH2-L2-VL2-L3-VL1-Fc and the second polypeptide has a structure represented by VL3-VH3; VH3-VL3; VL3-L4-VH3; VH3-L4-VL3; VL3-VH3-Fc; VH3-VL3-Fc; VL3-L4-VH3-Fc; VH3-L4-VL3-Fc; VL3-VH3-CH1; VH3-VL3-CH1; VL3-VH3-CL; VH3-VL3-CL; VL3-VH3-CH1-CL; VH3-VL3-CH1-CL; VL3-VH3-CL-CH1; VH3-VL3-CL-CH1; VL3-CL-VH3-CH1; VL3-CH1-VH3-CL; VH3-CH1-VL3-CL; VH3-CL-VL3-CH1; VL3-L6-VH3-L7-CH1; VH3-L6-VL3-L7-CH1; VL3-L6-VH3-L7-CL; VH3-L6-VL3-L7-CL; VL3-L6-VH3-L7-CH1-L8-CL; VH3-L6-VL3-L7-CH1-L8-CL; VL3-L6-VH3-L7-CL-L8-CH1; VH3-L6-VL3-L7-CL-L8-CH1; VL3-L6-CL-L7-VH3-L8-CH1; VL3-L6-CH1-L7-VH3-L8-CL; VH3-L6-CH1-L7-VL3-L8-CL; VH3-L6-CL-L7-VL3-L8-CH1; VL3-VH3-L6-CH1-CL; VH3-VL3-L6-CH1-CL; VL3-VH3-L6-CL-CH1; VH3-VL3-L6-CL-CH1; VL3-CL-L6-VH3-CH1; VL3-CH1-L6-VH3-CL; VH3-CH1-L6-VL3-CL; VH3-CL-L6-VL3-CH1; VL3-VH3-CH1-Fc; VH3-VL3-CH1-Fc; VL3-VH3-CL-Fc; VH3-VL3-CL-Fc; VL3-VH3-CH1-CL-Fc; VH3-VL3-CH1-CL-Fc; VL3-VH3-CL-CH1-Fc; VH3-VL3-CL-CH1-Fc; VL3-CL-VH3-CH1-Fe; VL3-CH1-VH3-CL-Fc; VH3-CH1-VL3-CL-Fc; VH3-CL-VL3-CH1-Fc; VL3-L6-VH3-L7-CH1-Fc; VH3-L6-VL3-L7-CH1-Fc; VL3-L6-VH3-L7-CL-Fc; VH3-L6-VL3-L7-CL-Fc; VL3-L6-VH3-L7-CH1-L8-CL-Fc; VH3-L6-VL3-L7-CH1-L8-CL-Fc; VL3-L6-VH3-L7-CL-L8-CH1-Fc; VH3-L6-VL3-L7-CL-L8-CH1-Fc; VL3-L6-CL-L7-VH3-L8-CH1-Fe; VL3-L6-CH1-L7-VH3-L8-CL-Fc; VH3-L6-CH1-L7-VL3-L8-CL-Fc; VH3-L6-CL-L7-VL3-L8-CH1-Fc; VL3-VH3-L6-CH1-CL-Fc; VH3-VL3-L6-CH1-CL-Fc; VL3-VH3-L6-CL-CH1-Fc; VH3-VL3-L6-CL-CH1-Fc; VL3-CL-L6-VH3-CH1-Fc; VL3-CH1-L6-VH3-CL-Fc; VH3-CH1-L6-VL3-CL-Fc; or VH3-CL-L6-VL3-CH1-Fc. In some aspects, the first polypeptide has a structure represented by VL1-L1-VL2-L2-VH2-L3-VH1-L4-Fc and the second polypeptide has a structure represented by VL3-VH3; VH3-VL3; VL3-L4-VH3; VH3-L4-VL3; VL3-VH3-Fc; VH3-VL3-Fc; VL3-L4-VH3-Fc; VH3-L4-VL3-Fc; VL3-VH3-CH1; VH3-VL3-CH1; VL3-VH3-CL; VH3-VL3-CL; VL3-VH3-CH1-CL; VH3-VL3-CH1-CL; VL3-VH3-CL-CH1; VH3-VL3-CL-CH1; VL3-CL-VH3-CH1; VL3-CH1-VH3-CL; VH3-CH1-VL3-CL; VH3-CL-VL3-CH1; VL3-L6-VH3-L7-CH1; VH3-L6-VL3-L7-CH1; VL3-L6-VH3-L7-CL; VH3-L6-VL3-L7-CL; VL3-L6-VH3-L7-CH1-L8-CL; VH3-L6-VL3-L7-CH1-L8-CL; VL3-L6-VH3-L7-CL-L8-CH1; VH3-L6-VL3-L7-CL-L8-CH1; VL3-L6-CL-L7-VH3-L8-CH1; VL3-L6-CH1-L7-VH3-L8-CL; VH3-L6-CH1-L7-VL3-L8-CL; VH3-L6-CL-L7-VL3-L8-CH1; VL3-VH3-L6-CH1-CL; VH3-VL3-L6-CH1-CL; VL3-VH3-L6-CL-CH1; VH3-VL3-L6-CL-CH1; VL3-CL-L6-VH3-CH1; VL3-CH1-L6-VH3-CL; VH3-CH1-L6-VL3-CL; VH3-CL-L6-VL3-CH1; VL3-VH3-CH1-Fc; VH3-VL3-CH1-Fc; VL3-VH3-CL-Fc; VH3-VL3-CL-Fc; VL3-VH3-CH1-CL-Fc; VH3-VL3-CH1-CL-Fc; VL3-VH3-CL-CH1-Fc; VH3-VL3-CL-CH1-Fc; VL3-CL-VH3-CH1-Fc; VL3-CH1-VH3-CL-Fc; VH3-CH1-VL3-CL-Fc; VH3-CL-VL3-CH1-Fc; VL3-L6-VH3-L7-CH1-Fc; VH3-L6-VL3-L7-CH1-Fc; VL3-L6-VH3-L7-CL-Fc; VH3-L6-VL3-L7-CL-Fe; VL3-L6-VH3-L7-CH1-L8-CL-Fc; VH3-L6-VL3-L7-CH1-L8-CL-Fc; VL3-L6-VH3-L7-CL-L8-CH1-Fc; VH3-L6-VL3-L7-CL-L8-CH1-Fc; VL3-L6-CL-L7-VH3-L8-CH1-Fc; VL3-L6-CH1-L7-VH3-L8-CL-Fc; VH3-L6-CH1-L7-VL3-L8-CL-Fc; VH3-L6-CL-L7-VL3-L8-CH1-Fc; VL3-VH3-L6-CH1-CL-Fc; VH3-VL3-L6-CH1-CL-Fc; VL3-VH3-L6-CL-CH1-Fc; VH3-VL3-L6-CL-CH1-Fc; VL3-CL-L6-VH3-CH1-Fc; VL3-CH1-L6-VH3-CL-Fc; VH3-CH1-L6-VL3-CL-Fc; or VH3-CL-L6-VL3-CH1-Fc. In some aspects, the first polypeptide has a structure represented by VH1-L1-VH2-L2-VL2-L3-VL1-L4-Fc and the second polypeptide has a structure represented by VL3-VH3; VH3-VL3; VL3-L4-VH3; VH3-L4-VL3; VL3-VH3-Fc; VH3-VL3-Fc; VL3-L4-VH3-Fc; VH3-L4-VL3-Fc; VL3-VH3-CH1; VH3-VL3-CH1; VL3-VH3-CL; VH3-VL3-CL; VL3-VH3-CH1-CL; VH3-VL3-CH1-CL; VL3-VH3-CL-CH1; VH3-VL3-CL-CH1; VL3-CL-VH3-CH1; VL3-CH1-VH3-CL; VH3-CH1-VL3-CL; VH3-CL-VL3-CH1; VL3-L6-VH3-L7-CH1; VH3-L6-VL3-L7-CH1; VL3-L6-VH3-L7-CL; VH3-L6-VL3-L7-CL; VL3-L6-VH3-L7-CH1-L8-CL; VH3-L6-VL3-L7-CH1-L8-CL; VL3-L6-VH3-L7-CL-L8-CH1; VH3-L6-VL3-L7-CL-L8-CH1; VL3-L6-CL-L7-VH3-L8-CH1; VL3-L6-CH1-L7-VH3-L8-CL; VH3-L6-CH1-L7-VL3-L8-CL; VH3-L6-CL-L7-VL3-L8-CH1; VL3-VH3-L6-CH1-CL; VH3-VL3-L6-CH1-CL; VL3-VH3-L6-CL-CH1; VH3-VL3-L6-CL-CH1; VL3-CL-L6-VH3-CH1; VL3-CH1-L6-VH3-CL; VH3-CH1-L6-VL3-CL; VH3-CL-L6-VL3-CH1; VL3-VH3-CH1-Fc; VH3-VL3-CH1-Fc; VL3-VH3-CL-Fc; VH3-VL3-CL-Fc; VL3-VH3-CH1-CL-Fc; VH3-VL3-CH1-CL-Fc; VL3-VH3-CL-CH1-Fc; VH3-VL3-CL-CH1-Fc; VL3-CL-VH3-CH1-Fe; VL3-CH1-VH3-CL-Fc; VH3-CH1-VL3-CL-Fc; VH3-CL-VL3-CH1-Fc; VL3-L6-VH3-L7-CH1-Fc; VH3-L6-VL3-L7-CH1-Fc; VL3-L6-VH3-L7-CL-Fc; VH3-L6-VL3-L7-CL-Fc; VL3-L6-VH3-L7-CH1-L8-CL-Fc; VH3-L6-VL3-L7-CH1-L8-CL-Fc; VL3-L6-VH3-L7-CL-L8-CH1-Fc; VH3-L6-VL3-L7-CL-L8-CH1-Fc; VL3-L6-CL-L7-VH3-L8-CH1-Fe; VL3-L6-CH1-L7-VH3-L8-CL-Fc; VH3-L6-CH1-L7-VL3-L8-CL-Fc; VH3-L6-CL-L7-VL3-L8-CH1-Fc; VL3-VH3-L6-CH1-CL-Fc; VH3-VL3-L6-CH1-CL-Fc; VL3-VH3-L6-CL-CH1-Fc; VH3-VL3-L6-CL-CH1-Fc; VL3-CL-L6-VH3-CH1-Fc; VL3-CH1-L6-VH3-CL-Fc; VH3-CH1-L6-VL3-CL-Fc; or VH3-CL-L6-VL3-CH1-Fc. In some aspects, the first polypeptide has a structure represented by VL1-VL2-VH2-VH1-CH1 and the second polypeptide has a structure represented by VL3-VH3; VH3-VL3; VL3-L4-VH3; VH3-L4-VL3; VL3-VH3-Fc; VH3-VL3-Fc; VL3-L4-VH3-Fc; VH3-L4-VL3-Fc; VL3-VH3-CH1; VH3-VL3-CH1; VL3-VH3-CL; VH3-VL3-CL; VL3-VH3-CH1-CL; VH3-VL3-CH1-CL; VL3-VH3-CL-CH1; VH3-VL3-CL-CH1; VL3-CL-VH3-CH1; VL3-CH1-VH3-CL; VH3-CH1-VL3-CL; VH3-CL-VL3-CH1; VL3-L6-VH3-L7-CH1; VH3-L6-VL3-L7-CH1; VL3-L6-VH3-L7-CL; VH3-L6-VL3-L7-CL; VL3-L6-VH3-L7-CH1-L8-CL; VH3-L6-VL3-L7-CH1-L8-CL; VL3-L6-VH3-L7-CL-L8-CH1; VH3-L6-VL3-L7-CL-L8-CH1; VL3-L6-CL-L7-VH3-L8-CH1; VL3-L6-CH1-L7-VH3-L8-CL; VH3-L6-CH1-L7-VL3-L8-CL; VH3-L6-CL-L7-VL3-L8-CH1; VL3-VH3-L6-CH1-CL; VH3-VL3-L6-CH1-CL; VL3-VH3-L6-CL-CH1; VH3-VL3-L6-CL-CH1; VL3-CL-L6-VH3-CH1; VL3-CH1-L6-VH3-CL; VH3-CH1-L6-VL3-CL; VH3-CL-L6-VL3-CH1; VL3-VH3-CH1-Fc; VH3-VL3-CH1-Fc; VL3-VH3-CL-Fc; VH3-VL3-CL-Fc; VL3-VH3-CH1-CL-Fc; VH3-VL3-CH1-CL-Fc; VL3-VH3-CL-CH1-Fc; VH3-VL3-CL-CH1-Fc; VL3-CL-VH3-CH1-Fc; VL3-CH1-VH3-CL-Fc; VH3-CH1-VL3-CL-Fc; VH3-CL-VL3-CH1-Fc; VL3-L6-VH3-L7-CH1-Fc; VH3-L6-VL3-L7-CH1-Fc; VL3-L6-VH3-L7-CL-Fc; VH3-L6-VL3-L7-CL-Fe; VL3-L6-VH3-L7-CH1-L8-CL-Fc; VH3-L6-VL3-L7-CH1-L8-CL-Fc; VL3-L6-VH3-L7-CL-L8-CH1-Fc; VH3-L6-VL3-L7-CL-L8-CH1-Fc; VL3-L6-CL-L7-VH3-L8-CH1-Fc; VL3-L6-CH1-L7-VH3-L8-CL-Fc; VH3-L6-CH1-L7-VL3-L8-CL-Fc; VH3-L6-CL-L7-VL3-L8-CH1-Fc; VL3-VH3-L6-CH1-CL-Fc; VH3-VL3-L6-CH1-CL-Fc; VL3-VH3-L6-CL-CH1-Fc; VH3-VL3-L6-CL-CH1-Fc; VL3-CL-L6-VH3-CH1-Fc; VL3-CH1-L6-VH3-CL-Fc; VH3-CH1-L6-VL3-CL-Fc; or VH3-CL-L6-VL3-CH1-Fe. In some aspects, the first polypeptide has a structure represented by VH1-VH2-VL2-VL1-CH1 and the second polypeptide has a structure represented by VL3-VH3; VH3-VL3; VL3-L4-VH3; VH3-L4-VL3; VL3-VH3-Fc; VH3-VL3-Fc; VL3-L4-VH3-Fc; VH3-L4-VL3-Fc; VL3-VH3-CH1; VH3-VL3-CH1; VL3-VH3-CL; VH3-VL3-CL; VL3-VH3-CH1-CL; VH3-VL3-CH1-CL; VL3-VH3-CL-CH1; VH3-VL3-CL-CH1; VL3-CL-VH3-CH1; VL3-CH1-VH3-CL; VH3-CH1-VL3-CL; VH3-CL-VL3-CH1; VL3-L6-VH3-L7-CH1; VH3-L6-VL3-L7-CH1; VL3-L6-VH3-L7-CL; VH3-L6-VL3-L7-CL; VL3-L6-VH3-L7-CH1-L8-CL; VH3-L6-VL3-L7-CH1-L8-CL; VL3-L6-VH3-L7-CL-L8-CH1; VH3-L6-VL3-L7-CL-L8-CH1; VL3-L6-CL-L7-VH3-L8-CH1; VL3-L6-CH1-L7-VH3-L8-CL; VH3-L6-CH1-L7-VL3-L8-CL; VH3-L6-CL-L7-VL3-L8-CH1; VL3-VH3-L6-CH1-CL; VH3-VL3-L6-CH1-CL; VL3-VH3-L6-CL-CH1; VH3-VL3-L6-CL-CH1; VL3-CL-L6-VH3-CH1; VL3-CH1-L6-VH3-CL; VH3-CH1-L6-VL3-CL; VH3-CL-L6-VL3-CH1; VL3-VH3-CH1-Fc; VH3-VL3-CH1-Fc; VL3-VH3-CL-Fc; VH3-VL3-CL-Fc; VL3-VH3-CH1-CL-Fc; VH3-VL3-CH1-CL-Fc; VL3-VH3-CL-CH1-Fc; VH3-VL3-CL-CH1-Fc; VL3-CL-VH3-CH1-Fc; VL3-CH1-VH3-CL-Fc; VH3-CH1-VL3-CL-Fc; VH3-CL-VL3-CH1-Fc; VL3-L6-VH3-L7-CH1-Fc; VH3-L6-VL3-L7-CH1-Fe; VL3-L6-VH3-L7-CL-Fc; VH3-L6-VL3-L7-CL-Fc; VL3-L6-VH3-L7-CH1-L8-CL-Fc; VH3-L6-VL3-L7-CH1-L8-CL-Fc; VL3-L6-VH3-L7-CL-L8-CH1-Fc; VH3-L6-VL3-L7-CL-L8-CH1-Fc; VL3-L6-CL-L7-VH3-L8-CH1-Fc; VL3-L6-CH1-L7-VH3-L8-CL-Fc; VH3-L6-CH1-L7-VL3-L8-CL-Fc; VH3-L6-CL-L7-VL3-L8-CH1-Fc; VL3-VH3-L6-CH1-CL-Fc; VH3-VL3-L6-CH1-CL-Fc; VL3-VH3-L6-CL-CH1-Fc; VH3-VL3-L6-CL-CH1-Fc; VL3-CL-L6-VH3-CH1-Fc; VL3-CH1-L6-VH3-CL-Fc; VH3-CH1-L6-VL3-CL-Fc; or VH3-CL-L6-VL3-CH1-Fe. In some aspects, the first polypeptide has a structure represented by VL1-VL2-VH2-VH1-CL and the second polypeptide has a structure represented by VL3-VH3; VH3-VL3; VL3-L4-VH3; VH3-L4-VL3; VL3-VH3-Fc; VH3-VL3-Fc; VL3-L4-VH3-Fc; VH3-L4-VL3-Fc; VL3-VH3-CH1; VH3-VL3-CH1; VL3-VH3-CL; VH3-VL3-CL; VL3-VH3-CH1-CL; VH3-VL3-CH1-CL; VL3-VH3-CL-CH1; VH3-VL3-CL-CH1; VL3-CL-VH3-CH1; VL3-CH1-VH3-CL; VH3-CH1-VL3-CL; VH3-CL-VL3-CH1; VL3-L6-VH3-L7-CH1; VH3-L6-VL3-L7-CH1; VL3-L6-VH3-L7-CL; VH3-L6-VL3-L7-CL; VL3-L6-VH3-L7-CH1-L8-CL; VH3-L6-VL3-L7-CH1-L8-CL; VL3-L6-VH3-L7-CL-L8-CH1; VH3-L6-VL3-L7-CL-L8-CH1; VL3-L6-CL-L7-VH3-L8-CH1; VL3-L6-CH1-L7-VH3-L8-CL; VH3-L6-CH1-L7-VL3-L8-CL; VH3-L6-CL-L7-VL3-L8-CH1; VL3-VH3-L6-CH1-CL; VH3-VL3-L6-CH1-CL; VL3-VH3-L6-CL-CH1; VH3-VL3-L6-CL-CH1; VL3-CL-L6-VH3-CH1; VL3-CH1-L6-VH3-CL; VH3-CH1-L6-VL3-CL; VH3-CL-L6-VL3-CH1; VL3-VH3-CH1-Fc; VH3-VL3-CH1-Fc; VL3-VH3-CL-Fc; VH3-VL3-CL-Fc; VL3-VH3-CH1-CL-Fc; VH3-VL3-CH1-CL-Fc; VL3-VH3-CL-CH1-Fc; VH3-VL3-CL-CH1-Fc; VL3-CL-VH3-CH1-Fc; VL3-CH1-VH3-CL-Fc; VH3-CH1-VL3-CL-Fc; VH3-CL-VL3-CH1-Fc; VL3-L6-VH3-L7-CH1-Fc; VH3-L6-VL3-L7-CH1-Fc; VL3-L6-VH3-L7-CL-Fc; VH3-L6-VL3-L7-CL-Fe; VL3-L6-VH3-L7-CH1-L8-CL-Fc; VH3-L6-VL3-L7-CH1-L8-CL-Fc; VL3-L6-VH3-L7-CL-L8-CH1-Fc; VH3-L6-VL3-L7-CL-L8-CH1-Fc; VL3-L6-CL-L7-VH3-L8-CH1-Fc; VL3-L6-CH1-L7-VH3-L8-CL-Fc; VH3-L6-CH1-L7-VL3-L8-CL-Fc; VH3-L6-CL-L7-VL3-L8-CH1-Fc; VL3-VH3-L6-CH1-CL-Fc; VH3-VL3-L6-CH1-CL-Fc; VL3-VH3-L6-CL-CH1-Fc; VH3-VL3-L6-CL-CH1-Fc; VL3-CL-L6-VH3-CH1-Fc; VL3-CH1-L6-VH3-CL-Fc; VH3-CH1-L6-VL3-CL-Fc; or VH3-CL-L6-VL3-CH1-Fe. In some aspects, the first polypeptide has a structure represented by VH1-VH2-VL2-VL1-CL and the second polypeptide has a structure represented by VL3-VH3; VH3-VL3; VL3-L4-VH3; VH3-L4-VL3; VL3-VH3-Fc; VH3-VL3-Fc; VL3-L4-VH3-Fc; VH3-L4-VL3-Fc; VL3-VH3-CH1; VH3-VL3-CH1; VL3-VH3-CL; VH3-VL3-CL; VL3-VH3-CH1-CL; VH3-VL3-CH1-CL; VL3-VH3-CL-CH1; VH3-VL3-CL-CH1; VL3-CL-VH3-CH1; VL3-CH1-VH3-CL; VH3-CH1-VL3-CL; VH3-CL-VL3-CH1; VL3-L6-VH3-L7-CH1; VH3-L6-VL3-L7-CH1; VL3-L6-VH3-L7-CL; VH3-L6-VL3-L7-CL; VL3-L6-VH3-L7-CH1-L8-CL; VH3-L6-VL3-L7-CH1-L8-CL; VL3-L6-VH3-L7-CL-L8-CH1; VH3-L6-VL3-L7-CL-L8-CH1; VL3-L6-CL-L7-VH3-L8-CH1; VL3-L6-CH1-L7-VH3-L8-CL; VH3-L6-CH1-L7-VL3-L8-CL; VH3-L6-CL-L7-VL3-L8-CH1; VL3-VH3-L6-CH1-CL; VH3-VL3-L6-CH1-CL; VL3-VH3-L6-CL-CH1; VH3-VL3-L6-CL-CH1; VL3-CL-L6-VH3-CH1; VL3-CH1-L6-VH3-CL; VH3-CH1-L6-VL3-CL; VH3-CL-L6-VL3-CH1; VL3-VH3-CH1-Fc; VH3-VL3-CH1-Fc; VL3-VH3-CL-Fc; VH3-VL3-CL-Fc; VL3-VH3-CH1-CL-Fc; VH3-VL3-CH1-CL-Fc; VL3-VH3-CL-CH1-Fc; VH3-VL3-CL-CH1-Fc; VL3-CL-VH3-CH1-Fc; VL3-CH1-VH3-CL-Fc; VH3-CH1-VL3-CL-Fc; VH3-CL-VL3-CH1-Fc; VL3-L6-VH3-L7-CH1-Fc; VH3-L6-VL3-L7-CH1-Fc; VL3-L6-VH3-L7-CL-Fc; VH3-L6-VL3-L7-CL-Fc; VL3-L6-VH3-L7-CH1-L8-CL-Fc; VH3-L6-VL3-L7-CH1-L8-CL-Fe; VL3-L6-VH3-L7-CL-L8-CH1-Fc; VH3-L6-VL3-L7-CL-L8-CH1-Fc; VL3-L6-CL-L7-VH3-L8-CH1-Fc; VL3-L6-CH1-L7-VH3-L8-CL-Fc; VH3-L6-CH1-L7-VL3-L8-CL-Fc; VH3-L6-CL-L7-VL3-L8-CH1-Fc; VL3-VH3-L6-CH1-CL-Fe; VH3-VL3-L6-CH1-CL-Fc; VL3-VH3-L6-CL-CH1-Fc; VH3-VL3-L6-CL-CH1-Fc; VL3-CL-L6-VH3-CH1-Fc; VL3-CH1-L6-VH3-CL-Fc; VH3-CH1-L6-VL3-CL-Fc; or VH3-CL-L6-VL3-CH1-Fe. In some aspects, the first polypeptide has a structure represented by VL1-VL2-VH2-VH1-CH1-CL and the second polypeptide has a structure represented by VL3-VH3; VH3-VL3; VL3-L4-VH3; VH3-L4-VL3; VL3-VH3-Fc; VH3-VL3-Fc; VL3-L4-VH3-Fc; VH3-L4-VL3-Fc; VL3-VH3-CH1; VH3-VL3-CH1; VL3-VH3-CL; VH3-VL3-CL; VL3-VH3-CH1-CL; VH3-VL3-CH1-CL; VL3-VH3-CL-CH1; VH3-VL3-CL-CH1; VL3-CL-VH3-CH1; VL3-CH1-VH3-CL; VH3-CH1-VL3-CL; VH3-CL-VL3-CH1; VL3-L6-VH3-L7-CH1; VH3-L6-VL3-L7-CH1; VL3-L6-VH3-L7-CL; VH3-L6-VL3-L7-CL; VL3-L6-VH3-L7-CH1-L8-CL; VH3-L6-VL3-L7-CH1-L8-CL; VL3-L6-VH3-L7-CL-L8-CH1; VH3-L6-VL3-L7-CL-L8-CH1; VL3-L6-CL-L7-VH3-L8-CH1; VL3-L6-CH1-L7-VH3-L8-CL; VH3-L6-CH1-L7-VL3-L8-CL; VH3-L6-CL-L7-VL3-L8-CH1; VL3-VH3-L6-CH1-CL; VH3-VL3-L6-CH1-CL; VL3-VH3-L6-CL-CH1; VH3-VL3-L6-CL-CH1; VL3-CL-L6-VH3-CH1; VL3-CH1-L6-VH3-CL; VH3-CH1-L6-VL3-CL; VH3-CL-L6-VL3-CH1; VL3-VH3-CH1-Fc; VH3-VL3-CH1-Fc; VL3-VH3-CL-Fc; VH3-VL3-CL-Fc; VL3-VH3-CH1-CL-Fc; VH3-VL3-CH1-CL-Fc; VL3-VH3-CL-CH1-Fc; VH3-VL3-CL-CH1-Fc; VL3-CL-VH3-CH1-Fc; VL3-CH1-VH3-CL-Fc; VH3-CH1-VL3-CL-Fc; VH3-CL-VL3-CH1-Fc; VL3-L6-VH3-L7-CH1-Fc; VH3-L6-VL3-L7-CH1-Fc; VL3-L6-VH3-L7-CL-Fc; VH3-L6-VL3-L7-CL-Fe; VL3-L6-VH3-L7-CH1-L8-CL-Fc; VH3-L6-VL3-L7-CH1-L8-CL-Fc; VL3-L6-VH3-L7-CL-L8-CH1-Fc; VH3-L6-VL3-L7-CL-L8-CH1-Fc; VL3-L6-CL-L7-VH3-L8-CH1-Fc; VL3-L6-CH1-L7-VH3-L8-CL-Fc; VH3-L6-CH1-L7-VL3-L8-CL-Fc; VH3-L6-CL-L7-VL3-L8-CH1-Fc; VL3-VH3-L6-CH1-CL-Fc; VH3-VL3-L6-CH1-CL-Fc; VL3-VH3-L6-CL-CH1-Fc; VH3-VL3-L6-CL-CH1-Fc; VL3-CL-L6-VH3-CH1-Fc; VL3-CH1-L6-VH3-CL-Fc; VH3-CH1-L6-VL3-CL-Fc; or VH3-CL-L6-VL3-CH1-Fe. In some aspects, the first polypeptide has a structure represented by VH1-VH2-VL2-VL1-CH1-CL and the second polypeptide has a structure represented by VL3-VH3; VH3-VL3; VL3-L4-VH3; VH3-L4-VL3; VL3-VH3-Fc; VH3-VL3-Fc; VL3-L4-VH3-Fc; VH3-L4-VL3-Fc; VL3-VH3-CH1; VH3-VL3-CH1; VL3-VH3-CL; VH3-VL3-CL; VL3-VH3-CH1-CL; VH3-VL3-CH1-CL; VL3-VH3-CL-CH1; VH3-VL3-CL-CH1; VL3-CL-VH3-CH1; VL3-CH1-VH3-CL; VH3-CH1-VL3-CL; VH3-CL-VL3-CH1; VL3-L6-VH3-L7-CH1; VH3-L6-VL3-L7-CH1; VL3-L6-VH3-L7-CL; VH3-L6-VL3-L7-CL; VL3-L6-VH3-L7-CH1-L8-CL; VH3-L6-VL3-L7-CH1-L8-CL; VL3-L6-VH3-L7-CL-L8-CH1; VH3-L6-VL3-L7-CL-L8-CH1; VL3-L6-CL-L7-VH3-L8-CH1; VL3-L6-CH1-L7-VH3-L8-CL; VH3-L6-CH1-L7-VL3-L8-CL; VH3-L6-CL-L7-VL3-L8-CH1; VL3-VH3-L6-CH1-CL; VH3-VL3-L6-CH1-CL; VL3-VH3-L6-CL-CH1; VH3-VL3-L6-CL-CH1; VL3-CL-L6-VH3-CH1; VL3-CH1-L6-VH3-CL; VH3-CH1-L6-VL3-CL; VH3-CL-L6-VL3-CH1; VL3-VH3-CH1-Fc; VH3-VL3-CH1-Fc; VL3-VH3-CL-Fc; VH3-VL3-CL-Fc; VL3-VH3-CH1-CL-Fc; VH3-VL3-CH1-CL-Fc; VL3-VH3-CL-CH1-Fc; VH3-VL3-CL-CH1-Fc; VL3-CL-VH3-CH1-Fc; VL3-CH1-VH3-CL-Fc; VH3-CH1-VL3-CL-Fc; VH3-CL-VL3-CH1-Fc; VL3-L6-VH3-L7-CH1-Fc; VH3-L6-VL3-L7-CH1-Fe; VL3-L6-VH3-L7-CL-Fc; VH3-L6-VL3-L7-CL-Fc; VL3-L6-VH3-L7-CH1-L8-CL-Fc; VH3-L6-VL3-L7-CH1-L8-CL-Fc; VL3-L6-VH3-L7-CL-L8-CH1-Fc; VH3-L6-VL3-L7-CL-L8-CH1-Fc; VL3-L6-CL-L7-VH3-L8-CH1-Fc; VL3-L6-CH1-L7-VH3-L8-CL-Fc; VH3-L6-CH1-L7-VL3-L8-CL-Fc; VH3-L6-CL-L7-VL3-L8-CH1-Fc; VL3-VH3-L6-CH1-CL-Fc; VH3-VL3-L6-CH1-CL-Fc; VL3-VH3-L6-CL-CH1-Fc; VH3-VL3-L6-CL-CH1-Fc; VL3-CL-L6-VH3-CH1-Fc; VL3-CH1-L6-VH3-CL-Fc; VH3-CH1-L6-VL3-CL-Fc; or VH3-CL-L6-VL3-CH1-Fe. In some aspects, the first polypeptide has a structure represented by VL1-VL2-VH2-VH1-CL-CH1 and the second polypeptide has a structure represented by VL3-VH3; VH3-VL3; VL3-L4-VH3; VH3-L4-VL3; VL3-VH3-Fc; VH3-VL3-Fc; VL3-L4-VH3-Fc; VH3-L4-VL3-Fc; VL3-VH3-CH1; VH3-VL3-CH1; VL3-VH3-CL; VH3-VL3-CL; VL3-VH3-CH1-CL; VH3-VL3-CH1-CL; VL3-VH3-CL-CH1; VH3-VL3-CL-CH1; VL3-CL-VH3-CH1; VL3-CH1-VH3-CL; VH3-CH1-VL3-CL; VH3-CL-VL3-CH1; VL3-L6-VH3-L7-CH1; VH3-L6-VL3-L7-CH1; VL3-L6-VH3-L7-CL; VH3-L6-VL3-L7-CL; VL3-L6-VH3-L7-CH1-L8-CL; VH3-L6-VL3-L7-CH1-L8-CL; VL3-L6-VH3-L7-CL-L8-CH1; VH3-L6-VL3-L7-CL-L8-CH1; VL3-L6-CL-L7-VH3-L8-CH1; VL3-L6-CH1-L7-VH3-L8-CL; VH3-L6-CH1-L7-VL3-L8-CL; VH3-L6-CL-L7-VL3-L8-CH1; VL3-VH3-L6-CH1-CL; VH3-VL3-L6-CH1-CL; VL3-VH3-L6-CL-CH1; VH3-VL3-L6-CL-CH1; VL3-CL-L6-VH3-CH1; VL3-CH1-L6-VH3-CL; VH3-CH1-L6-VL3-CL; VH3-CL-L6-VL3-CH1; VL3-VH3-CH1-Fc; VH3-VL3-CH1-Fc; VL3-VH3-CL-Fc; VH3-VL3-CL-Fc; VL3-VH3-CH1-CL-Fc; VH3-VL3-CH1-CL-Fc; VL3-VH3-CL-CH1-Fc; VH3-VL3-CL-CH1-Fc; VL3-CL-VH3-CH1-Fc; VL3-CH1-VH3-CL-Fc; VH3-CH1-VL3-CL-Fc; VH3-CL-VL3-CH1-Fc; VL3-L6-VH3-L7-CH1-Fc; VH3-L6-VL3-L7-CH1-Fc; VL3-L6-VH3-L7-CL-Fc; VH3-L6-VL3-L7-CL-Fe; VL3-L6-VH3-L7-CH1-L8-CL-Fc; VH3-L6-VL3-L7-CH1-L8-CL-Fc; VL3-L6-VH3-L7-CL-L8-CH1-Fc; VH3-L6-VL3-L7-CL-L8-CH1-Fc; VL3-L6-CL-L7-VH3-L8-CH1-Fc; VL3-L6-CH1-L7-VH3-L8-CL-Fc; VH3-L6-CH1-L7-VL3-L8-CL-Fc; VH3-L6-CL-L7-VL3-L8-CH1-Fc; VL3-VH3-L6-CH1-CL-Fc; VH3-VL3-L6-CH1-CL-Fc; VL3-VH3-L6-CL-CH1-Fc; VH3-VL3-L6-CL-CH1-Fc; VL3-CL-L6-VH3-CH1-Fc; VL3-CH1-L6-VH3-CL-Fc; VH3-CH1-L6-VL3-CL-Fc; or VH3-CL-L6-VL3-CH1-Fe. In some aspects, the first polypeptide has a structure represented by VH1-VH2-VL2-VL1-CL-CH1 and the second polypeptide has a structure represented by VL3-VH3; VH3-VL3; VL3-L4-VH3; VH3-L4-VL3; VL3-VH3-Fc; VH3-VL3-Fc; VL3-L4-VH3-Fc; VH3-L4-VL3-Fc; VL3-VH3-CH1; VH3-VL3-CH1; VL3-VH3-CL; VH3-VL3-CL; VL3-VH3-CH1-CL; VH3-VL3-CH1-CL; VL3-VH3-CL-CH1; VH3-VL3-CL-CH1; VL3-CL-VH3-CH1; VL3-CH1-VH3-CL; VH3-CH1-VL3-CL; VH3-CL-VL3-CH1; VL3-L6-VH3-L7-CH1; VH3-L6-VL3-L7-CH1; VL3-L6-VH3-L7-CL; VH3-L6-VL3-L7-CL; VL3-L6-VH3-L7-CH1-L8-CL; VH3-L6-VL3-L7-CH1-L8-CL; VL3-L6-VH3-L7-CL-L8-CH1; VH3-L6-VL3-L7-CL-L8-CH1; VL3-L6-CL-L7-VH3-L8-CH1; VL3-L6-CH1-L7-VH3-L8-CL; VH3-L6-CH1-L7-VL3-L8-CL; VH3-L6-CL-L7-VL3-L8-CH1; VL3-VH3-L6-CH1-CL; VH3-VL3-L6-CH1-CL; VL3-VH3-L6-CL-CH1; VH3-VL3-L6-CL-CH1; VL3-CL-L6-VH3-CH1; VL3-CH1-L6-VH3-CL; VH3-CH1-L6-VL3-CL; VH3-CL-L6-VL3-CH1; VL3-VH3-CH1-Fc; VH3-VL3-CH1-Fc; VL3-VH3-CL-Fc; VH3-VL3-CL-Fc; VL3-VH3-CH1-CL-Fc; VH3-VL3-CH1-CL-Fc; VL3-VH3-CL-CH1-Fc; VH3-VL3-CL-CH1-Fc; VL3-CL-VH3-CH1-Fc; VL3-CH1-VH3-CL-Fc; VH3-CH1-VL3-CL-Fc; VH3-CL-VL3-CH1-Fc; VL3-L6-VH3-L7-CH1-Fc; VH3-L6-VL3-L7-CH1-Fe; VL3-L6-VH3-L7-CL-Fc; VH3-L6-VL3-L7-CL-Fc; VL3-L6-VH3-L7-CH1-L8-CL-Fc; VH3-L6-VL3-L7-CH1-L8-CL-Fc; VL3-L6-VH3-L7-CL-L8-CH1-Fc; VH3-L6-VL3-L7-CL-L8-CH1-Fc; VL3-L6-CL-L7-VH3-L8-CH1-Fc; VL3-L6-CH1-L7-VH3-L8-CL-Fc; VH3-L6-CH1-L7-VL3-L8-CL-Fc; VH3-L6-CL-L7-VL3-L8-CH1-Fc; VL3-VH3-L6-CH1-CL-Fc; VH3-VL3-L6-CH1-CL-Fc; VL3-VH3-L6-CL-CH1-Fc; VH3-VL3-L6-CL-CH1-Fc; VL3-CL-L6-VH3-CH1-Fc; VL3-CH1-L6-VH3-CL-Fc; VH3-CH1-L6-VL3-CL-Fc; or VH3-CL-L6-VL3-CH1-Fe. In some aspects, the first polypeptide has a structure represented by VL1-L1-VL2-L2-VH2-L3-VH1-L4-CH1 and the second polypeptide has a structure represented by VL3-VH3; VH3-VL3; VL3-L4-VH3; VH3-L4-VL3; VL3-VH3-Fc; VH3-VL3-Fc; VL3-L4-VH3-Fc; VH3-L4-VL3-Fc; VL3-VH3-CH1; VH3-VL3-CH1; VL3-VH3-CL; VH3-VL3-CL; VL3-VH3-CH1-CL; VH3-VL3-CH1-CL; VL3-VH3-CL-CH1; VH3-VL3-CL-CH1; VL3-CL-VH3-CH1; VL3-CH1-VH3-CL; VH3-CH1-VL3-CL; VH3-CL-VL3-CH1; VL3-L6-VH3-L7-CH1; VH3-L6-VL3-L7-CH1; VL3-L6-VH3-L7-CL; VH3-L6-VL3-L7-CL; VL3-L6-VH3-L7-CH1-L8-CL; VH3-L6-VL3-L7-CH1-L8-CL; VL3-L6-VH3-L7-CL-L8-CH1; VH3-L6-VL3-L7-CL-L8-CH1; VL3-L6-CL-L7-VH3-L8-CH1; VL3-L6-CH1-L7-VH3-L8-CL; VH3-L6-CH1-L7-VL3-L8-CL; VH3-L6-CL-L7-VL3-L8-CH1; VL3-VH3-L6-CH1-CL; VH3-VL3-L6-CH1-CL; VL3-VH3-L6-CL-CH1; VH3-VL3-L6-CL-CH1; VL3-CL-L6-VH3-CH1; VL3-CH1-L6-VH3-CL; VH3-CH1-L6-VL3-CL; VH3-CL-L6-VL3-CH1; VL3-VH3-CH1-Fc; VH3-VL3-CH1-Fc; VL3-VH3-CL-Fc; VH3-VL3-CL-Fc; VL3-VH3-CH1-CL-Fc; VH3-VL3-CH1-CL-Fc; VL3-VH3-CL-CH1-Fc; VH3-VL3-CL-CH1-Fc; VL3-CL-VH3-CH1-Fc; VL3-CH1-VH3-CL-Fc; VH3-CH1-VL3-CL-Fc; VH3-CL-VL3-CH1-Fc; VL3-L6-VH3-L7-CH1-Fc; VH3-L6-VL3-L7-CH1-Fc; VL3-L6-VH3-L7-CL-Fc; VH3-L6-VL3-L7-CL-Fe; VL3-L6-VH3-L7-CH1-L8-CL-Fc; VH3-L6-VL3-L7-CH1-L8-CL-Fc; VL3-L6-VH3-L7-CL-L8-CH1-Fc; VH3-L6-VL3-L7-CL-L8-CH1-Fc; VL3-L6-CL-L7-VH3-L8-CH1-Fc; VL3-L6-CH1-L7-VH3-L8-CL-Fc; VH3-L6-CH1-L7-VL3-L8-CL-Fc; VH3-L6-CL-L7-VL3-L8-CH1-Fc; VL3-VH3-L6-CH1-CL-Fc; VH3-VL3-L6-CH1-CL-Fc; VL3-VH3-L6-CL-CH1-Fc; VH3-VL3-L6-CL-CH1-Fc; VL3-CL-L6-VH3-CH1-Fc; VL3-CH1-L6-VH3-CL-Fc; VH3-CH1-L6-VL3-CL-Fc; or VH3-CL-L6-VL3-CH1-Fc. In some aspects, the first polypeptide has a structure represented by VH1-L1-VH2-L2-VL2-L3-VL1-L4-CH1 and the second polypeptide has a structure represented by VL3-VH3; VH3-VL3; VL3-L4-VH3; VH3-L4-VL3; VL3-VH3-Fc; VH3-VL3-Fc; VL3-L4-VH3-Fc; VH3-L4-VL3-Fc; VL3-VH3-CH1; VH3-VL3-CH1; VL3-VH3-CL; VH3-VL3-CL; VL3-VH3-CH1-CL; VH3-VL3-CH1-CL; VL3-VH3-CL-CH1; VH3-VL3-CL-CH1; VL3-CL-VH3-CH1; VL3-CH1-VH3-CL; VH3-CH1-VL3-CL; VH3-CL-VL3-CH1; VL3-L6-VH3-L7-CH1; VH3-L6-VL3-L7-CH1; VL3-L6-VH3-L7-CL; VH3-L6-VL3-L7-CL; VL3-L6-VH3-L7-CH1-L8-CL; VH3-L6-VL3-L7-CH1-L8-CL; VL3-L6-VH3-L7-CL-L8-CH1; VH3-L6-VL3-L7-CL-L8-CH1; VL3-L6-CL-L7-VH3-L8-CH1; VL3-L6-CH1-L7-VH3-L8-CL; VH3-L6-CH1-L7-VL3-L8-CL; VH3-L6-CL-L7-VL3-L8-CH1; VL3-VH3-L6-CH1-CL; VH3-VL3-L6-CH1-CL; VL3-VH3-L6-CL-CH1; VH3-VL3-L6-CL-CH1; VL3-CL-L6-VH3-CH1; VL3-CH1-L6-VH3-CL; VH3-CH1-L6-VL3-CL; VH3-CL-L6-VL3-CH1; VL3-VH3-CH1-Fc; VH3-VL3-CH1-Fc; VL3-VH3-CL-Fc; VH3-VL3-CL-Fc; VL3-VH3-CH1-CL-Fc; VH3-VL3-CH1-CL-Fc; VL3-VH3-CL-CH1-Fc; VH3-VL3-CL-CH1-Fc; VL3-CL-VH3-CH1-Fe; VL3-CH1-VH3-CL-Fc; VH3-CH1-VL3-CL-Fc; VH3-CL-VL3-CH1-Fc; VL3-L6-VH3-L7-CH1-Fc; VH3-L6-VL3-L7-CH1-Fc; VL3-L6-VH3-L7-CL-Fc; VH3-L6-VL3-L7-CL-Fc; VL3-L6-VH3-L7-CH1-L8-CL-Fc; VH3-L6-VL3-L7-CH1-L8-CL-Fc; VL3-L6-VH3-L7-CL-L8-CH1-Fc; VH3-L6-VL3-L7-CL-L8-CH1-Fc; VL3-L6-CL-L7-VH3-L8-CH1-Fe; VL3-L6-CH1-L7-VH3-L8-CL-Fc; VH3-L6-CH1-L7-VL3-L8-CL-Fc; VH3-L6-CL-L7-VL3-L8-CH1-Fc; VL3-VH3-L6-CH1-CL-Fc; VH3-VL3-L6-CH1-CL-Fc; VL3-VH3-L6-CL-CH1-Fc; VH3-VL3-L6-CL-CH1-Fc; VL3-CL-L6-VH3-CH1-Fc; VL3-CH1-L6-VH3-CL-Fc; VH3-CH1-L6-VL3-CL-Fc; or VH3-CL-L6-VL3-CH1-Fc. In some aspects, the first polypeptide has a structure represented by VL1-L1-VL2-L2-VH2-L3-VH1-L4-CL and the second polypeptide has a structure represented by VL3-VH3; VH3-VL3; VL3-L4-VH3; VH3-L4-VL3; VL3-VH3-Fc; VH3-VL3-Fc; VL3-L4-VH3-Fc; VH3-L4-VL3-Fc; VL3-VH3-CH1; VH3-VL3-CH1; VL3-VH3-CL; VH3-VL3-CL; VL3-VH3-CH1-CL; VH3-VL3-CH1-CL; VL3-VH3-CL-CH1; VH3-VL3-CL-CH1; VL3-CL-VH3-CH1; VL3-CH1-VH3-CL; VH3-CH1-VL3-CL; VH3-CL-VL3-CH1; VL3-L6-VH3-L7-CH1; VH3-L6-VL3-L7-CH1; VL3-L6-VH3-L7-CL; VH3-L6-VL3-L7-CL; VL3-L6-VH3-L7-CH1-L8-CL; VH3-L6-VL3-L7-CH1-L8-CL; VL3-L6-VH3-L7-CL-L8-CH1; VH3-L6-VL3-L7-CL-L8-CH1; VL3-L6-CL-L7-VH3-L8-CH1; VL3-L6-CH1-L7-VH3-L8-CL; VH3-L6-CH1-L7-VL3-L8-CL; VH3-L6-CL-L7-VL3-L8-CH1; VL3-VH3-L6-CH1-CL; VH3-VL3-L6-CH1-CL; VL3-VH3-L6-CL-CH1; VH3-VL3-L6-CL-CH1; VL3-CL-L6-VH3-CH1; VL3-CH1-L6-VH3-CL; VH3-CH1-L6-VL3-CL; VH3-CL-L6-VL3-CH1; VL3-VH3-CH1-Fc; VH3-VL3-CH1-Fc; VL3-VH3-CL-Fc; VH3-VL3-CL-Fc; VL3-VH3-CH1-CL-Fc; VH3-VL3-CH1-CL-Fc; VL3-VH3-CL-CH1-Fc; VH3-VL3-CL-CH1-Fc; VL3-CL-VH3-CH1-Fc; VL3-CH1-VH3-CL-Fc; VH3-CH1-VL3-CL-Fc; VH3-CL-VL3-CH1-Fc; VL3-L6-VH3-L7-CH1-Fc; VH3-L6-VL3-L7-CH1-Fc; VL3-L6-VH3-L7-CL-Fc; VH3-L6-VL3-L7-CL-Fe; VL3-L6-VH3-L7-CH1-L8-CL-Fc; VH3-L6-VL3-L7-CH1-L8-CL-Fc; VL3-L6-VH3-L7-CL-L8-CH1-Fc; VH3-L6-VL3-L7-CL-L8-CH1-Fc; VL3-L6-CL-L7-VH3-L8-CH1-Fc; VL3-L6-CH1-L7-VH3-L8-CL-Fc; VH3-L6-CH1-L7-VL3-L8-CL-Fc; VH3-L6-CL-L7-VL3-L8-CH1-Fc; VL3-VH3-L6-CH1-CL-Fc; VH3-VL3-L6-CH1-CL-Fc; VL3-VH3-L6-CL-CH1-Fc; VH3-VL3-L6-CL-CH1-Fc; VL3-CL-L6-VH3-CH1-Fc; VL3-CH1-L6-VH3-CL-Fc; VH3-CH1-L6-VL3-CL-Fc; or VH3-CL-L6-VL3-CH1-Fc. In some aspects, the first polypeptide has a structure represented by VH1-L1-VH2-L2-VL2-L3-VL1-L4-CL and the second polypeptide has a structure represented by VL3-VH3; VH3-VL3; VL3-L4-VH3; VH3-L4-VL3; VL3-VH3-Fc; VH3-VL3-Fc; VL3-L4-VH3-Fc; VH3-L4-VL3-Fc; VL3-VH3-CH1; VH3-VL3-CH1; VL3-VH3-CL; VH3-VL3-CL; VL3-VH3-CH1-CL; VH3-VL3-CH1-CL; VL3-VH3-CL-CH1; VH3-VL3-CL-CH1; VL3-CL-VH3-CH1; VL3-CH1-VH3-CL; VH3-CH1-VL3-CL; VH3-CL-VL3-CH1; VL3-L6-VH3-L7-CH1; VH3-L6-VL3-L7-CH1; VL3-L6-VH3-L7-CL; VH3-L6-VL3-L7-CL; VL3-L6-VH3-L7-CH1-L8-CL; VH3-L6-VL3-L7-CH1-L8-CL; VL3-L6-VH3-L7-CL-L8-CH1; VH3-L6-VL3-L7-CL-L8-CH1; VL3-L6-CL-L7-VH3-L8-CH1; VL3-L6-CH1-L7-VH3-L8-CL; VH3-L6-CH1-L7-VL3-L8-CL; VH3-L6-CL-L7-VL3-L8-CH1; VL3-VH3-L6-CH1-CL; VH3-VL3-L6-CH1-CL; VL3-VH3-L6-CL-CH1; VH3-VL3-L6-CL-CH1; VL3-CL-L6-VH3-CH1; VL3-CH1-L6-VH3-CL; VH3-CH1-L6-VL3-CL; VH3-CL-L6-VL3-CH1; VL3-VH3-CH1-Fc; VH3-VL3-CH1-Fc; VL3-VH3-CL-Fc; VH3-VL3-CL-Fc; VL3-VH3-CH1-CL-Fc; VH3-VL3-CH1-CL-Fc; VL3-VH3-CL-CH1-Fc; VH3-VL3-CL-CH1-Fc; VL3-CL-VH3-CH1-Fe; VL3-CH1-VH3-CL-Fc; VH3-CH1-VL3-CL-Fc; VH3-CL-VL3-CH1-Fc; VL3-L6-VH3-L7-CH1-Fc; VH3-L6-VL3-L7-CH1-Fc; VL3-L6-VH3-L7-CL-Fc; VH3-L6-VL3-L7-CL-Fc; VL3-L6-VH3-L7-CH1-L8-CL-Fc; VH3-L6-VL3-L7-CH1-L8-CL-Fc; VL3-L6-VH3-L7-CL-L8-CH1-Fc; VH3-L6-VL3-L7-CL-L8-CH1-Fc; VL3-L6-CL-L7-VH3-L8-CH1-Fe; VL3-L6-CH1-L7-VH3-L8-CL-Fc; VH3-L6-CH1-L7-VL3-L8-CL-Fc; VH3-L6-CL-L7-VL3-L8-CH1-Fc; VL3-VH3-L6-CH1-CL-Fc; VH3-VL3-L6-CH1-CL-Fc; VL3-VH3-L6-CL-CH1-Fc; VH3-VL3-L6-CL-CH1-Fc; VL3-CL-L6-VH3-CH1-Fc; VL3-CH1-L6-VH3-CL-Fc; VH3-CH1-L6-VL3-CL-Fc; or VH3-CL-L6-VL3-CH1-Fc. In some aspects, the first polypeptide has a structure represented by VL1-L1-VL2-L2-VH2-L3-VH1-L4-CH1-L5-CL and the second polypeptide has a structure represented by VL3-VH3; VH3-VL3; VL3-L4-VH3; VH3-L4-VL3; VL3-VH3-Fc; VH3-VL3-Fc; VL3-L4-VH3-Fc; VH3-L4-VL3-Fc; VL3-VH3-CH1; VH3-VL3-CH1; VL3-VH3-CL; VH3-VL3-CL; VL3-VH3-CH1-CL; VH3-VL3-CH1-CL; VL3-VH3-CL-CH1; VH3-VL3-CL-CH1; VL3-CL-VH3-CH1; VL3-CH1-VH3-CL; VH3-CH1-VL3-CL; VH3-CL-VL3-CH1; VL3-L6-VH3-L7-CH1; VH3-L6-VL3-L7-CH1; VL3-L6-VH3-L7-CL; VH3-L6-VL3-L7-CL; VL3-L6-VH3-L7-CH1-L8-CL; VH3-L6-VL3-L7-CH1-L8-CL; VL3-L6-VH3-L7-CL-L8-CH1; VH3-L6-VL3-L7-CL-L8-CH1; VL3-L6-CL-L7-VH3-L8-CH1; VL3-L6-CH1-L7-VH3-L8-CL; VH3-L6-CH1-L7-VL3-L8-CL; VH3-L6-CL-L7-VL3-L8-CH1; VL3-VH3-L6-CH1-CL; VH3-VL3-L6-CH1-CL; VL3-VH3-L6-CL-CH1; VH3-VL3-L6-CL-CH1; VL3-CL-L6-VH3-CH1; VL3-CH1-L6-VH3-CL; VH3-CH1-L6-VL3-CL; VH3-CL-L6-VL3-CH1; VL3-VH3-CH1-Fc; VH3-VL3-CH1-Fc; VL3-VH3-CL-Fc; VH3-VL3-CL-Fc; VL3-VH3-CH1-CL-Fc; VH3-VL3-CH1-CL-Fc; VL3-VH3-CL-CH1-Fc; VH3-VL3-CL-CH1-Fc; VL3-CL-VH3-CH1-Fc; VL3-CH1-VH3-CL-Fc; VH3-CH1-VL3-CL-Fc; VH3-CL-VL3-CH1-Fc; VL3-L6-VH3-L7-CH1-Fc; VH3-L6-VL3-L7-CH1-Fc; VL3-L6-VH3-L7-CL-Fc; VH3-L6-VL3-L7-CL-Fe; VL3-L6-VH3-L7-CH1-L8-CL-Fc; VH3-L6-VL3-L7-CH1-L8-CL-Fc; VL3-L6-VH3-L7-CL-L8-CH1-Fc; VH3-L6-VL3-L7-CL-L8-CH1-Fc; VL3-L6-CL-L7-VH3-L8-CH1-Fc; VL3-L6-CH1-L7-VH3-L8-CL-Fc; VH3-L6-CH1-L7-VL3-L8-CL-Fc; VH3-L6-CL-L7-VL3-L8-CH1-Fc; VL3-VH3-L6-CH1-CL-Fc; VH3-VL3-L6-CH1-CL-Fc; VL3-VH3-L6-CL-CH1-Fc; VH3-VL3-L6-CL-CH1-Fc; VL3-CL-L6-VH3-CH1-Fc; VL3-CH1-L6-VH3-CL-Fc; VH3-CH1-L6-VL3-CL-Fc; or VH3-CL-L6-VL3-CH1-Fc. In some aspects, the first polypeptide has a structure represented by VH1-L1-VH2-L2-VL2-L3-VL1-L4-CH1-L5-CL and the second polypeptide has a structure represented by VL3-VH3; VH3-VL3; VL3-L4-VH3; VH3-L4-VL3; VL3-VH3-Fc; VH3-VL3-Fc; VL3-L4-VH3-Fc; VH3-L4-VL3-Fc; VL3-VH3-CH1; VH3-VL3-CH1; VL3-VH3-CL; VH3-VL3-CL; VL3-VH3-CH1-CL; VH3-VL3-CH1-CL; VL3-VH3-CL-CH1; VH3-VL3-CL-CH1; VL3-CL-VH3-CH1; VL3-CH1-VH3-CL; VH3-CH1-VL3-CL; VH3-CL-VL3-CH1; VL3-L6-VH3-L7-CH1; VH3-L6-VL3-L7-CH1; VL3-L6-VH3-L7-CL; VH3-L6-VL3-L7-CL; VL3-L6-VH3-L7-CH1-L8-CL; VH3-L6-VL3-L7-CH1-L8-CL; VL3-L6-VH3-L7-CL-L8-CH1; VH3-L6-VL3-L7-CL-L8-CH1; VL3-L6-CL-L7-VH3-L8-CH1; VL3-L6-CH1-L7-VH3-L8-CL; VH3-L6-CH1-L7-VL3-L8-CL; VH3-L6-CL-L7-VL3-L8-CH1; VL3-VH3-L6-CH1-CL; VH3-VL3-L6-CH1-CL; VL3-VH3-L6-CL-CH1; VH3-VL3-L6-CL-CH1; VL3-CL-L6-VH3-CH1; VL3-CH1-L6-VH3-CL; VH3-CH1-L6-VL3-CL; VH3-CL-L6-VL3-CH1; VL3-VH3-CH1-Fc; VH3-VL3-CH1-Fc; VL3-VH3-CL-Fc; VH3-VL3-CL-Fc; VL3-VH3-CH1-CL-Fc; VH3-VL3-CH1-CL-Fc; VL3-VH3-CL-CH1-Fc; VH3-VL3-CL-CH1-Fc; VL3-CL-VH3-CH1-Fe; VL3-CH1-VH3-CL-Fc; VH3-CH1-VL3-CL-Fc; VH3-CL-VL3-CH1-Fc; VL3-L6-VH3-L7-CH1-Fc; VH3-L6-VL3-L7-CH1-Fc; VL3-L6-VH3-L7-CL-Fc; VH3-L6-VL3-L7-CL-Fc; VL3-L6-VH3-L7-CH1-L8-CL-Fc; VH3-L6-VL3-L7-CH1-L8-CL-Fc; VL3-L6-VH3-L7-CL-L8-CH1-Fc; VH3-L6-VL3-L7-CL-L8-CH1-Fc; VL3-L6-CL-L7-VH3-L8-CH1-Fe; VL3-L6-CH1-L7-VH3-L8-CL-Fc; VH3-L6-CH1-L7-VL3-L8-CL-Fc; VH3-L6-CL-L7-VL3-L8-CH1-Fc; VL3-VH3-L6-CH1-CL-Fc; VH3-VL3-L6-CH1-CL-Fc; VL3-VH3-L6-CL-CH1-Fc; VH3-VL3-L6-CL-CH1-Fc; VL3-CL-L6-VH3-CH1-Fc; VL3-CH1-L6-VH3-CL-Fc; VH3-CH1-L6-VL3-CL-Fc; or VH3-CL-L6-VL3-CH1-Fc. In some aspects, the first polypeptide has a structure represented by VL1-L1-VL2-L2-VH2-L3-VH1-L4-CL-L5-CH1 and the second polypeptide has a structure represented by VL3-VH3; VH3-VL3; VL3-L4-VH3; VH3-L4-VL3; VL3-VH3-Fc; VH3-VL3-Fc; VL3-L4-VH3-Fc; VH3-L4-VL3-Fc; VL3-VH3-CH1; VH3-VL3-CH1; VL3-VH3-CL; VH3-VL3-CL; VL3-VH3-CH1-CL; VH3-VL3-CH1-CL; VL3-VH3-CL-CH1; VH3-VL3-CL-CH1; VL3-CL-VH3-CH1; VL3-CH1-VH3-CL; VH3-CH1-VL3-CL; VH3-CL-VL3-CH1; VL3-L6-VH3-L7-CH1; VH3-L6-VL3-L7-CH1; VL3-L6-VH3-L7-CL; VH3-L6-VL3-L7-CL; VL3-L6-VH3-L7-CH1-L8-CL; VH3-L6-VL3-L7-CH1-L8-CL; VL3-L6-VH3-L7-CL-L8-CH1; VH3-L6-VL3-L7-CL-L8-CH1; VL3-L6-CL-L7-VH3-L8-CH1; VL3-L6-CH1-L7-VH3-L8-CL; VH3-L6-CH1-L7-VL3-L8-CL; VH3-L6-CL-L7-VL3-L8-CH1; VL3-VH3-L6-CH1-CL; VH3-VL3-L6-CH1-CL; VL3-VH3-L6-CL-CH1; VH3-VL3-L6-CL-CH1; VL3-CL-L6-VH3-CH1; VL3-CH1-L6-VH3-CL; VH3-CH1-L6-VL3-CL; VH3-CL-L6-VL3-CH1; VL3-VH3-CH1-Fc; VH3-VL3-CH1-Fc; VL3-VH3-CL-Fc; VH3-VL3-CL-Fc; VL3-VH3-CH1-CL-Fc; VH3-VL3-CH1-CL-Fc; VL3-VH3-CL-CH1-Fc; VH3-VL3-CL-CH1-Fc; VL3-CL-VH3-CH1-Fc; VL3-CH1-VH3-CL-Fc; VH3-CH1-VL3-CL-Fc; VH3-CL-VL3-CH1-Fc; VL3-L6-VH3-L7-CH1-Fc; VH3-L6-VL3-L7-CH1-Fc; VL3-L6-VH3-L7-CL-Fc; VH3-L6-VL3-L7-CL-Fe; VL3-L6-VH3-L7-CH1-L8-CL-Fc; VH3-L6-VL3-L7-CH1-L8-CL-Fc; VL3-L6-VH3-L7-CL-L8-CH1-Fc; VH3-L6-VL3-L7-CL-L8-CH1-Fc; VL3-L6-CL-L7-VH3-L8-CH1-Fc; VL3-L6-CH1-L7-VH3-L8-CL-Fc; VH3-L6-CH1-L7-VL3-L8-CL-Fc; VH3-L6-CL-L7-VL3-L8-CH1-Fc; VL3-VH3-L6-CH1-CL-Fc; VH3-VL3-L6-CH1-CL-Fc; VL3-VH3-L6-CL-CH1-Fc; VH3-VL3-L6-CL-CH1-Fc; VL3-CL-L6-VH3-CH1-Fc; VL3-CH1-L6-VH3-CL-Fc; VH3-CH1-L6-VL3-CL-Fc; or VH3-CL-L6-VL3-CH1-Fc. In some aspects, the first polypeptide has a structure represented by VH1-L1-VH2-L2-VL2-L3-VL1-L4-CL-L5-CH1 and the second polypeptide has a structure represented by VL3-VH3; VH3-VL3; VL3-L4-VH3; VH3-L4-VL3; VL3-VH3-Fc; VH3-VL3-Fc; VL3-L4-VH3-Fc; VH3-L4-VL3-Fc; VL3-VH3-CH1; VH3-VL3-CH1; VL3-VH3-CL; VH3-VL3-CL; VL3-VH3-CH1-CL; VH3-VL3-CH1-CL; VL3-VH3-CL-CH1; VH3-VL3-CL-CH1; VL3-CL-VH3-CH1; VL3-CH1-VH3-CL; VH3-CH1-VL3-CL; VH3-CL-VL3-CH1; VL3-L6-VH3-L7-CH1; VH3-L6-VL3-L7-CH1; VL3-L6-VH3-L7-CL; VH3-L6-VL3-L7-CL; VL3-L6-VH3-L7-CH1-L8-CL; VH3-L6-VL3-L7-CH1-L8-CL; VL3-L6-VH3-L7-CL-L8-CH1; VH3-L6-VL3-L7-CL-L8-CH1; VL3-L6-CL-L7-VH3-L8-CH1; VL3-L6-CH1-L7-VH3-L8-CL; VH3-L6-CH1-L7-VL3-L8-CL; VH3-L6-CL-L7-VL3-L8-CH1; VL3-VH3-L6-CH1-CL; VH3-VL3-L6-CH1-CL; VL3-VH3-L6-CL-CH1; VH3-VL3-L6-CL-CH1; VL3-CL-L6-VH3-CH1; VL3-CH1-L6-VH3-CL; VH3-CH1-L6-VL3-CL; VH3-CL-L6-VL3-CH1; VL3-VH3-CH1-Fc; VH3-VL3-CH1-Fc; VL3-VH3-CL-Fc; VH3-VL3-CL-Fc; VL3-VH3-CH1-CL-Fc; VH3-VL3-CH1-CL-Fc; VL3-VH3-CL-CH1-Fc; VH3-VL3-CL-CH1-Fc; VL3-CL-VH3-CH1-Fe; VL3-CH1-VH3-CL-Fc; VH3-CH1-VL3-CL-Fc; VH3-CL-VL3-CH1-Fc; VL3-L6-VH3-L7-CH1-Fc; VH3-L6-VL3-L7-CH1-Fc; VL3-L6-VH3-L7-CL-Fc; VH3-L6-VL3-L7-CL-Fc; VL3-L6-VH3-L7-CH1-L8-CL-Fc; VH3-L6-VL3-L7-CH1-L8-CL-Fc; VL3-L6-VH3-L7-CL-L8-CH1-Fc; VH3-L6-VL3-L7-CL-L8-CH1-Fc; VL3-L6-CL-L7-VH3-L8-CH1-Fe; VL3-L6-CH1-L7-VH3-L8-CL-Fc; VH3-L6-CH1-L7-VL3-L8-CL-Fc; VH3-L6-CL-L7-VL3-L8-CH1-Fc; VL3-VH3-L6-CH1-CL-Fc; VH3-VL3-L6-CH1-CL-Fc; VL3-VH3-L6-CL-CH1-Fc; VH3-VL3-L6-CL-CH1-Fc; VL3-CL-L6-VH3-CH1-Fc; VL3-CH1-L6-VH3-CL-Fc; VH3-CH1-L6-VL3-CL-Fc; or VH3-CL-L6-VL3-CH1-Fc. In some aspects, the first polypeptide has a structure represented by VL1-VL2-VH2-VH1-CH1-Fc and the second polypeptide has a structure represented by VL3-VH3; VH3-VL3; VL3-L4-VH3; VH3-L4-VL3; VL3-VH3-Fc; VH3-VL3-Fc; VL3-L4-VH3-Fc; VH3-L4-VL3-Fc; VL3-VH3-CH1; VH3-VL3-CH1; VL3-VH3-CL; VH3-VL3-CL; VL3-VH3-CH1-CL; VH3-VL3-CH1-CL; VL3-VH3-CL-CH1; VH3-VL3-CL-CH1; VL3-CL-VH3-CH1; VL3-CH1-VH3-CL; VH3-CH1-VL3-CL; VH3-CL-VL3-CH1; VL3-L6-VH3-L7-CH1; VH3-L6-VL3-L7-CH1; VL3-L6-VH3-L7-CL; VH3-L6-VL3-L7-CL; VL3-L6-VH3-L7-CH1-L8-CL; VH3-L6-VL3-L7-CH1-L8-CL; VL3-L6-VH3-L7-CL-L8-CH1; VH3-L6-VL3-L7-CL-L8-CH1; VL3-L6-CL-L7-VH3-L8-CH1; VL3-L6-CH1-L7-VH3-L8-CL; VH3-L6-CH1-L7-VL3-L8-CL; VH3-L6-CL-L7-VL3-L8-CH1; VL3-VH3-L6-CH1-CL; VH3-VL3-L6-CH1-CL; VL3-VH3-L6-CL-CH1; VH3-VL3-L6-CL-CH1; VL3-CL-L6-VH3-CH1; VL3-CH1-L6-VH3-CL; VH3-CH1-L6-VL3-CL; VH3-CL-L6-VL3-CH1; VL3-VH3-CH1-Fc; VH3-VL3-CH1-Fc; VL3-VH3-CL-Fc; VH3-VL3-CL-Fc; VL3-VH3-CH1-CL-Fc; VH3-VL3-CH1-CL-Fc; VL3-VH3-CL-CH1-Fc; VH3-VL3-CL-CH1-Fc; VL3-CL-VH3-CH1-Fc; VL3-CH1-VH3-CL-Fc; VH3-CH1-VL3-CL-Fc; VH3-CL-VL3-CH1-Fc; VL3-L6-VH3-L7-CH1-Fc; VH3-L6-VL3-L7-CH1-Fc; VL3-L6-VH3-L7-CL-Fc; VH3-L6-VL3-L7-CL-Fe; VL3-L6-VH3-L7-CH1-L8-CL-Fc; VH3-L6-VL3-L7-CH1-L8-CL-Fc; VL3-L6-VH3-L7-CL-L8-CH1-Fc; VH3-L6-VL3-L7-CL-L8-CH1-Fc; VL3-L6-CL-L7-VH3-L8-CH1-Fc; VL3-L6-CH1-L7-VH3-L8-CL-Fc; VH3-L6-CH1-L7-VL3-L8-CL-Fc; VH3-L6-CL-L7-VL3-L8-CH1-Fc; VL3-VH3-L6-CH1-CL-Fc; VH3-VL3-L6-CH1-CL-Fc; VL3-VH3-L6-CL-CH1-Fc; VH3-VL3-L6-CL-CH1-Fc; VL3-CL-L6-VH3-CH1-Fc; VL3-CH1-L6-VH3-CL-Fc; VH3-CH1-L6-VL3-CL-Fc; or VH3-CL-L6-VL3-CH1-Fe. In some aspects, the first polypeptide has a structure represented by VH1-VH2-VL2-VL1-CH1-Fc and the second polypeptide has a structure represented by VL3-VH3; VH3-VL3; VL3-L4-VH3; VH3-L4-VL3; VL3-VH3-Fc; VH3-VL3-Fc; VL3-L4-VH3-Fc; VH3-L4-VL3-Fc; VL3-VH3-CH1; VH3-VL3-CH1; VL3-VH3-CL; VH3-VL3-CL; VL3-VH3-CH1-CL; VH3-VL3-CH1-CL; VL3-VH3-CL-CH1; VH3-VL3-CL-CH1; VL3-CL-VH3-CH1; VL3-CH1-VH3-CL; VH3-CH1-VL3-CL; VH3-CL-VL3-CH1; VL3-L6-VH3-L7-CH1; VH3-L6-VL3-L7-CH1; VL3-L6-VH3-L7-CL; VH3-L6-VL3-L7-CL; VL3-L6-VH3-L7-CH1-L8-CL; VH3-L6-VL3-L7-CH1-L8-CL; VL3-L6-VH3-L7-CL-L8-CH1; VH3-L6-VL3-L7-CL-L8-CH1; VL3-L6-CL-L7-VH3-L8-CH1; VL3-L6-CH1-L7-VH3-L8-CL; VH3-L6-CH1-L7-VL3-L8-CL; VH3-L6-CL-L7-VL3-L8-CH1; VL3-VH3-L6-CH1-CL; VH3-VL3-L6-CH1-CL; VL3-VH3-L6-CL-CH1; VH3-VL3-L6-CL-CH1; VL3-CL-L6-VH3-CH1; VL3-CH1-L6-VH3-CL; VH3-CH1-L6-VL3-CL; VH3-CL-L6-VL3-CH1; VL3-VH3-CH1-Fc; VH3-VL3-CH1-Fc; VL3-VH3-CL-Fc; VH3-VL3-CL-Fc; VL3-VH3-CH1-CL-Fc; VH3-VL3-CH1-CL-Fc; VL3-VH3-CL-CH1-Fc; VH3-VL3-CL-CH1-Fc; VL3-CL-VH3-CH1-Fc; VL3-CH1-VH3-CL-Fc; VH3-CH1-VL3-CL-Fc; VH3-CL-VL3-CH1-Fc; VL3-L6-VH3-L7-CH1-Fc; VH3-L6-VL3-L7-CH1-Fe; VL3-L6-VH3-L7-CL-Fc; VH3-L6-VL3-L7-CL-Fc; VL3-L6-VH3-L7-CH1-L8-CL-Fc; VH3-L6-VL3-L7-CH1-L8-CL-Fc; VL3-L6-VH3-L7-CL-L8-CH1-Fc; VH3-L6-VL3-L7-CL-L8-CH1-Fc; VL3-L6-CL-L7-VH3-L8-CH1-Fc; VL3-L6-CH1-L7-VH3-L8-CL-Fc; VH3-L6-CH1-L7-VL3-L8-CL-Fc; VH3-L6-CL-L7-VL3-L8-CH1-Fc; VL3-VH3-L6-CH1-CL-Fc; VH3-VL3-L6-CH1-CL-Fc; VL3-VH3-L6-CL-CH1-Fc; VH3-VL3-L6-CL-CH1-Fc; VL3-CL-L6-VH3-CH1-Fc; VL3-CH1-L6-VH3-CL-Fc; VH3-CH1-L6-VL3-CL-Fc; or VH3-CL-L6-VL3-CH1-Fe. In some aspects, the first polypeptide has a structure represented by VL1-VL2-VH2-VH1-CL-Fc and the second polypeptide has a structure represented by VL3-VH3; VH3-VL3; VL3-L4-VH3; VH3-L4-VL3; VL3-VH3-Fc; VH3-VL3-Fc; VL3-L4-VH3-Fc; VH3-L4-VL3-Fc; VL3-VH3-CH1; VH3-VL3-CH1; VL3-VH3-CL; VH3-VL3-CL; VL3-VH3-CH1-CL; VH3-VL3-CH1-CL; VL3-VH3-CL-CH1; VH3-VL3-CL-CH1; VL3-CL-VH3-CH1; VL3-CH1-VH3-CL; VH3-CH1-VL3-CL; VH3-CL-VL3-CH1; VL3-L6-VH3-L7-CH1; VH3-L6-VL3-L7-CH1; VL3-L6-VH3-L7-CL; VH3-L6-VL3-L7-CL; VL3-L6-VH3-L7-CH1-L8-CL; VH3-L6-VL3-L7-CH1-L8-CL; VL3-L6-VH3-L7-CL-L8-CH1; VH3-L6-VL3-L7-CL-L8-CH1; VL3-L6-CL-L7-VH3-L8-CH1; VL3-L6-CH1-L7-VH3-L8-CL; VH3-L6-CH1-L7-VL3-L8-CL; VH3-L6-CL-L7-VL3-L8-CH1; VL3-VH3-L6-CH1-CL; VH3-VL3-L6-CH1-CL; VL3-VH3-L6-CL-CH1; VH3-VL3-L6-CL-CH1; VL3-CL-L6-VH3-CH1; VL3-CH1-L6-VH3-CL; VH3-CH1-L6-VL3-CL; VH3-CL-L6-VL3-CH1; VL3-VH3-CH1-Fc; VH3-VL3-CH1-Fc; VL3-VH3-CL-Fc; VH3-VL3-CL-Fc; VL3-VH3-CH1-CL-Fc; VH3-VL3-CH1-CL-Fc; VL3-VH3-CL-CH1-Fc; VH3-VL3-CL-CH1-Fc; VL3-CL-VH3-CH1-Fc; VL3-CH1-VH3-CL-Fc; VH3-CH1-VL3-CL-Fc; VH3-CL-VL3-CH1-Fc; VL3-L6-VH3-L7-CH1-Fc; VH3-L6-VL3-L7-CH1-Fc; VL3-L6-VH3-L7-CL-Fc; VH3-L6-VL3-L7-CL-Fe; VL3-L6-VH3-L7-CH1-L8-CL-Fc; VH3-L6-VL3-L7-CH1-L8-CL-Fc; VL3-L6-VH3-L7-CL-L8-CH1-Fc; VH3-L6-VL3-L7-CL-L8-CH1-Fc; VL3-L6-CL-L7-VH3-L8-CH1-Fc; VL3-L6-CH1-L7-VH3-L8-CL-Fc; VH3-L6-CH1-L7-VL3-L8-CL-Fc; VH3-L6-CL-L7-VL3-L8-CH1-Fc; VL3-VH3-L6-CH1-CL-Fc; VH3-VL3-L6-CH1-CL-Fc; VL3-VH3-L6-CL-CH1-Fc; VH3-VL3-L6-CL-CH1-Fc; VL3-CL-L6-VH3-CH1-Fc; VL3-CH1-L6-VH3-CL-Fc; VH3-CH1-L6-VL3-CL-Fc; or VH3-CL-L6-VL3-CH1-Fe. In some aspects, the first polypeptide has a structure represented by VH1-VH2-VL2-VL1-CL-Fc and the second polypeptide has a structure represented by VL3-VH3; VH3-VL3; VL3-L4-VH3; VH3-L4-VL3; VL3-VH3-Fc; VH3-VL3-Fc; VL3-L4-VH3-Fc; VH3-L4-VL3-Fc; VL3-VH3-CH1; VH3-VL3-CH1; VL3-VH3-CL; VH3-VL3-CL; VL3-VH3-CH1-CL; VH3-VL3-CH1-CL; VL3-VH3-CL-CH1; VH3-VL3-CL-CH1; VL3-CL-VH3-CH1; VL3-CH1-VH3-CL; VH3-CH1-VL3-CL; VH3-CL-VL3-CH1; VL3-L6-VH3-L7-CH1; VH3-L6-VL3-L7-CH1; VL3-L6-VH3-L7-CL; VH3-L6-VL3-L7-CL; VL3-L6-VH3-L7-CH1-L8-CL; VH3-L6-VL3-L7-CH1-L8-CL; VL3-L6-VH3-L7-CL-L8-CH1; VH3-L6-VL3-L7-CL-L8-CH1; VL3-L6-CL-L7-VH3-L8-CH1; VL3-L6-CH1-L7-VH3-L8-CL; VH3-L6-CH1-L7-VL3-L8-CL; VH3-L6-CL-L7-VL3-L8-CH1; VL3-VH3-L6-CH1-CL; VH3-VL3-L6-CH1-CL; VL3-VH3-L6-CL-CH1; VH3-VL3-L6-CL-CH1; VL3-CL-L6-VH3-CH1; VL3-CH1-L6-VH3-CL; VH3-CH1-L6-VL3-CL; VH3-CL-L6-VL3-CH1; VL3-VH3-CH1-Fc; VH3-VL3-CH1-Fc; VL3-VH3-CL-Fc; VH3-VL3-CL-Fc; VL3-VH3-CH1-CL-Fc; VH3-VL3-CH1-CL-Fc; VL3-VH3-CL-CH1-Fc; VH3-VL3-CL-CH1-Fc; VL3-CL-VH3-CH1-Fc; VL3-CH1-VH3-CL-Fc; VH3-CH1-VL3-CL-Fc; VH3-CL-VL3-CH1-Fc; VL3-L6-VH3-L7-CH1-Fc; VH3-L6-VL3-L7-CH1-Fe; VL3-L6-VH3-L7-CL-Fc; VH3-L6-VL3-L7-CL-Fc; VL3-L6-VH3-L7-CH1-L8-CL-Fc; VH3-L6-VL3-L7-CH1-L8-CL-Fc; VL3-L6-VH3-L7-CL-L8-CH1-Fc; VH3-L6-VL3-L7-CL-L8-CH1-Fc; VL3-L6-CL-L7-VH3-L8-CH1-Fc; VL3-L6-CH1-L7-VH3-L8-CL-Fc; VH3-L6-CH1-L7-VL3-L8-CL-Fc; VH3-L6-CL-L7-VL3-L8-CH1-Fc; VL3-VH3-L6-CH1-CL-Fc; VH3-VL3-L6-CH1-CL-Fc; VL3-VH3-L6-CL-CH1-Fc; VH3-VL3-L6-CL-CH1-Fc; VL3-CL-L6-VH3-CH1-Fc; VL3-CH1-L6-VH3-CL-Fc; VH3-CH1-L6-VL3-CL-Fc; or VH3-CL-L6-VL3-CH1-Fc. In some aspects, the first polypeptide has a structure represented by VL1-VL2-VH2-VH1-CH1-CL-Fc and the second polypeptide has a structure represented by VL3-VH3; VH3-VL3; VL3-L4-VH3; VH3-L4-VL3; VL3-VH3-Fc; VH3-VL3-Fc; VL3-L4-VH3-Fc; VH3-L4-VL3-Fc; VL3-VH3-CH1; VH3-VL3-CH1; VL3-VH3-CL; VH3-VL3-CL; VL3-VH3-CH1-CL; VH3-VL3-CH1-CL; VL3-VH3-CL-CH1; VH3-VL3-CL-CH1; VL3-CL-VH3-CH1; VL3-CH1-VH3-CL; VH3-CH1-VL3-CL; VH3-CL-VL3-CH1; VL3-L6-VH3-L7-CH1; VH3-L6-VL3-L7-CH1; VL3-L6-VH3-L7-CL; VH3-L6-VL3-L7-CL; VL3-L6-VH3-L7-CH1-L8-CL; VH3-L6-VL3-L7-CH1-L8-CL; VL3-L6-VH3-L7-CL-L8-CH1; VH3-L6-VL3-L7-CL-L8-CH1; VL3-L6-CL-L7-VH3-L8-CH1; VL3-L6-CH1-L7-VH3-L8-CL; VH3-L6-CH1-L7-VL3-L8-CL; VH3-L6-CL-L7-VL3-L8-CH1; VL3-VH3-L6-CH1-CL; VH3-VL3-L6-CH1-CL; VL3-VH3-L6-CL-CH1; VH3-VL3-L6-CL-CH1; VL3-CL-L6-VH3-CH1; VL3-CH1-L6-VH3-CL; VH3-CH1-L6-VL3-CL; VH3-CL-L6-VL3-CH1; VL3-VH3-CH1-Fc; VH3-VL3-CH1-Fc; VL3-VH3-CL-Fc; VH3-VL3-CL-Fc; VL3-VH3-CH1-CL-Fc; VH3-VL3-CH1-CL-Fc; VL3-VH3-CL-CH1-Fc; VH3-VL3-CL-CH1-Fc; VL3-CL-VH3-CH1-Fc; VL3-CH1-VH3-CL-Fc; VH3-CH1-VL3-CL-Fc; VH3-CL-VL3-CH1-Fc; VL3-L6-VH3-L7-CH1-Fc; VH3-L6-VL3-L7-CH1-Fc; VL3-L6-VH3-L7-CL-Fc; VH3-L6-VL3-L7-CL-Fe; VL3-L6-VH3-L7-CH1-L8-CL-Fc; VH3-L6-VL3-L7-CH1-L8-CL-Fc; VL3-L6-VH3-L7-CL-L8-CH1-Fc; VH3-L6-VL3-L7-CL-L8-CH1-Fc; VL3-L6-CL-L7-VH3-L8-CH1-Fc; VL3-L6-CH1-L7-VH3-L8-CL-Fc; VH3-L6-CH1-L7-VL3-L8-CL-Fc; VH3-L6-CL-L7-VL3-L8-CH1-Fc; VL3-VH3-L6-CH1-CL-Fc; VH3-VL3-L6-CH1-CL-Fc; VL3-VH3-L6-CL-CH1-Fc; VH3-VL3-L6-CL-CH1-Fc; VL3-CL-L6-VH3-CH1-Fc; VL3-CH1-L6-VH3-CL-Fc; VH3-CH1-L6-VL3-CL-Fc; or VH3-CL-L6-VL3-CH1-Fe. In some aspects, the first polypeptide has a structure represented by VH1-VH2-VL2-VL1-CH1-CL-Fc and the second polypeptide has a structure represented by VL3-VH3; VH3-VL3; VL3-L4-VH3; VH3-L4-VL3; VL3-VH3-Fc; VH3-VL3-Fc; VL3-L4-VH3-Fc; VH3-L4-VL3-Fc; VL3-VH3-CH1; VH3-VL3-CH1; VL3-VH3-CL; VH3-VL3-CL; VL3-VH3-CH1-CL; VH3-VL3-CH1-CL; VL3-VH3-CL-CH1; VH3-VL3-CL-CH1; VL3-CL-VH3-CH1; VL3-CH1-VH3-CL; VH3-CH1-VL3-CL; VH3-CL-VL3-CH1; VL3-L6-VH3-L7-CH1; VH3-L6-VL3-L7-CH1; VL3-L6-VH3-L7-CL; VH3-L6-VL3-L7-CL; VL3-L6-VH3-L7-CH1-L8-CL; VH3-L6-VL3-L7-CH1-L8-CL; VL3-L6-VH3-L7-CL-L8-CH1; VH3-L6-VL3-L7-CL-L8-CH1; VL3-L6-CL-L7-VH3-L8-CH1; VL3-L6-CH1-L7-VH3-L8-CL; VH3-L6-CH1-L7-VL3-L8-CL; VH3-L6-CL-L7-VL3-L8-CH1; VL3-VH3-L6-CH1-CL; VH3-VL3-L6-CH1-CL; VL3-VH3-L6-CL-CH1; VH3-VL3-L6-CL-CH1; VL3-CL-L6-VH3-CH1; VL3-CH1-L6-VH3-CL; VH3-CH1-L6-VL3-CL; VH3-CL-L6-VL3-CH1; VL3-VH3-CH1-Fc; VH3-VL3-CH1-Fc; VL3-VH3-CL-Fc; VH3-VL3-CL-Fc; VL3-VH3-CH1-CL-Fc; VH3-VL3-CH1-CL-Fc; VL3-VH3-CL-CH1-Fc; VH3-VL3-CL-CH1-Fc; VL3-CL-VH3-CH1-Fc; VL3-CH1-VH3-CL-Fc; VH3-CH1-VL3-CL-Fc; VH3-CL-VL3-CH1-Fc; VL3-L6-VH3-L7-CH1-Fc; VH3-L6-VL3-L7-CH1-Fe; VL3-L6-VH3-L7-CL-Fc; VH3-L6-VL3-L7-CL-Fc; VL3-L6-VH3-L7-CH1-L8-CL-Fc; VH3-L6-VL3-L7-CH1-L8-CL-Fc; VL3-L6-VH3-L7-CL-L8-CH1-Fc; VH3-L6-VL3-L7-CL-L8-CH1-Fc; VL3-L6-CL-L7-VH3-L8-CH1-Fc; VL3-L6-CH1-L7-VH3-L8-CL-Fc; VH3-L6-CH1-L7-VL3-L8-CL-Fc; VH3-L6-CL-L7-VL3-L8-CH1-Fc; VL3-VH3-L6-CH1-CL-Fc; VH3-VL3-L6-CH1-CL-Fc; VL3-VH3-L6-CL-CH1-Fc; VH3-VL3-L6-CL-CH1-Fc; VL3-CL-L6-VH3-CH1-Fc; VL3-CH1-L6-VH3-CL-Fc; VH3-CH1-L6-VL3-CL-Fc; or VH3-CL-L6-VL3-CH1-Fe. In some aspects, the first polypeptide has a structure represented by VL1-VL2-VH2-VH1-CL-CH1-Fc and the second polypeptide has a structure represented by VL3-VH3; VH3-VL3; VL3-L4-VH3; VH3-L4-VL3; VL3-VH3-Fc; VH3-VL3-Fc; VL3-L4-VH3-Fc; VH3-L4-VL3-Fc; VL3-VH3-CH1; VH3-VL3-CH1; VL3-VH3-CL; VH3-VL3-CL; VL3-VH3-CH1-CL; VH3-VL3-CH1-CL; VL3-VH3-CL-CH1; VH3-VL3-CL-CH1; VL3-CL-VH3-CH1; VL3-CH1-VH3-CL; VH3-CH1-VL3-CL; VH3-CL-VL3-CH1; VL3-L6-VH3-L7-CH1; VH3-L6-VL3-L7-CH1; VL3-L6-VH3-L7-CL; VH3-L6-VL3-L7-CL; VL3-L6-VH3-L7-CH1-L8-CL; VH3-L6-VL3-L7-CH1-L8-CL; VL3-L6-VH3-L7-CL-L8-CH1; VH3-L6-VL3-L7-CL-L8-CH1; VL3-L6-CL-L7-VH3-L8-CH1; VL3-L6-CH1-L7-VH3-L8-CL; VH3-L6-CH1-L7-VL3-L8-CL; VH3-L6-CL-L7-VL3-L8-CH1; VL3-VH3-L6-CH1-CL; VH3-VL3-L6-CH1-CL; VL3-VH3-L6-CL-CH1; VH3-VL3-L6-CL-CH1; VL3-CL-L6-VH3-CH1; VL3-CH1-L6-VH3-CL; VH3-CH1-L6-VL3-CL; VH3-CL-L6-VL3-CH1; VL3-VH3-CH1-Fc; VH3-VL3-CH1-Fc; VL3-VH3-CL-Fc; VH3-VL3-CL-Fc; VL3-VH3-CH1-CL-Fc; VH3-VL3-CH1-CL-Fc; VL3-VH3-CL-CH1-Fc; VH3-VL3-CL-CH1-Fc; VL3-CL-VH3-CH1-Fc; VL3-CH1-VH3-CL-Fc; VH3-CH1-VL3-CL-Fc; VH3-CL-VL3-CH1-Fc; VL3-L6-VH3-L7-CH1-Fc; VH3-L6-VL3-L7-CH1-Fc; VL3-L6-VH3-L7-CL-Fc; VH3-L6-VL3-L7-CL-Fe; VL3-L6-VH3-L7-CH1-L8-CL-Fc; VH3-L6-VL3-L7-CH1-L8-CL-Fc; VL3-L6-VH3-L7-CL-L8-CH1-Fc; VH3-L6-VL3-L7-CL-L8-CH1-Fc; VL3-L6-CL-L7-VH3-L8-CH1-Fc; VL3-L6-CH1-L7-VH3-L8-CL-Fc; VH3-L6-CH1-L7-VL3-L8-CL-Fc; VH3-L6-CL-L7-VL3-L8-CH1-Fc; VL3-VH3-L6-CH1-CL-Fc; VH3-VL3-L6-CH1-CL-Fc; VL3-VH3-L6-CL-CH1-Fc; VH3-VL3-L6-CL-CH1-Fc; VL3-CL-L6-VH3-CH1-Fc; VL3-CH1-L6-VH3-CL-Fc; VH3-CH1-L6-VL3-CL-Fc; or VH3-CL-L6-VL3-CH1-Fe. In some aspects, the first polypeptide has a structure represented by VH1-VH2-VL2-VL1-CL-CH1-Fc and the second polypeptide has a structure represented by VL3-VH3; VH3-VL3; VL3-L4-VH3; VH3-L4-VL3; VL3-VH3-Fc; VH3-VL3-Fc; VL3-L4-VH3-Fc; VH3-L4-VL3-Fc; VL3-VH3-CH1; VH3-VL3-CH1; VL3-VH3-CL; VH3-VL3-CL; VL3-VH3-CH1-CL; VH3-VL3-CH1-CL; VL3-VH3-CL-CH1; VH3-VL3-CL-CH1; VL3-CL-VH3-CH1; VL3-CH1-VH3-CL; VH3-CH1-VL3-CL; VH3-CL-VL3-CH1; VL3-L6-VH3-L7-CH1; VH3-L6-VL3-L7-CH1; VL3-L6-VH3-L7-CL; VH3-L6-VL3-L7-CL; VL3-L6-VH3-L7-CH1-L8-CL; VH3-L6-VL3-L7-CH1-L8-CL; VL3-L6-VH3-L7-CL-L8-CH1; VH3-L6-VL3-L7-CL-L8-CH1; VL3-L6-CL-L7-VH3-L8-CH1; VL3-L6-CH1-L7-VH3-L8-CL; VH3-L6-CH1-L7-VL3-L8-CL; VH3-L6-CL-L7-VL3-L8-CH1; VL3-VH3-L6-CH1-CL; VH3-VL3-L6-CH1-CL; VL3-VH3-L6-CL-CH1; VH3-VL3-L6-CL-CH1; VL3-CL-L6-VH3-CH1; VL3-CH1-L6-VH3-CL; VH3-CH1-L6-VL3-CL; VH3-CL-L6-VL3-CH1; VL3-VH3-CH1-Fc; VH3-VL3-CH1-Fc; VL3-VH3-CL-Fc; VH3-VL3-CL-Fc; VL3-VH3-CH1-CL-Fc; VH3-VL3-CH1-CL-Fc; VL3-VH3-CL-CH1-Fc; VH3-VL3-CL-CH1-Fc; VL3-CL-VH3-CH1-Fc; VL3-CH1-VH3-CL-Fc; VH3-CH1-VL3-CL-Fc; VH3-CL-VL3-CH1-Fc; VL3-L6-VH3-L7-CH1-Fc; VH3-L6-VL3-L7-CH1-Fe; VL3-L6-VH3-L7-CL-Fc; VH3-L6-VL3-L7-CL-Fc; VL3-L6-VH3-L7-CH1-L8-CL-Fc; VH3-L6-VL3-L7-CH1-L8-CL-Fc; VL3-L6-VH3-L7-CL-L8-CH1-Fc; VH3-L6-VL3-L7-CL-L8-CH1-Fc; VL3-L6-CL-L7-VH3-L8-CH1-Fc; VL3-L6-CH1-L7-VH3-L8-CL-Fc; VH3-L6-CH1-L7-VL3-L8-CL-Fc; VH3-L6-CL-L7-VL3-L8-CH1-Fc; VL3-VH3-L6-CH1-CL-Fc; VH3-VL3-L6-CH1-CL-Fc; VL3-VH3-L6-CL-CH1-Fc; VH3-VL3-L6-CL-CH1-Fc; VL3-CL-L6-VH3-CH1-Fc; VL3-CH1-L6-VH3-CL-Fc; VH3-CH1-L6-VL3-CL-Fc; or VH3-CL-L6-VL3-CH1-Fe. In some aspects, the first polypeptide has a structure represented by VL1-L1-VL2-L2-VH2-L3-VH1-L4-CH1-Fc and the second polypeptide has a structure represented by VL3-VH3; VH3-VL3; VL3-L4-VH3; VH3-L4-VL3; VL3-VH3-Fc; VH3-VL3-Fc; VL3-L4-VH3-Fc; VH3-L4-VL3-Fc; VL3-VH3-CH1; VH3-VL3-CH1; VL3-VH3-CL; VH3-VL3-CL; VL3-VH3-CH1-CL; VH3-VL3-CH1-CL; VL3-VH3-CL-CH1; VH3-VL3-CL-CH1; VL3-CL-VH3-CH1; VL3-CH1-VH3-CL; VH3-CH1-VL3-CL; VH3-CL-VL3-CH1; VL3-L6-VH3-L7-CH1; VH3-L6-VL3-L7-CH1; VL3-L6-VH3-L7-CL; VH3-L6-VL3-L7-CL; VL3-L6-VH3-L7-CH1-L8-CL; VH3-L6-VL3-L7-CH1-L8-CL; VL3-L6-VH3-L7-CL-L8-CH1; VH3-L6-VL3-L7-CL-L8-CH1; VL3-L6-CL-L7-VH3-L8-CH1; VL3-L6-CH1-L7-VH3-L8-CL; VH3-L6-CH1-L7-VL3-L8-CL; VH3-L6-CL-L7-VL3-L8-CH1; VL3-VH3-L6-CH1-CL; VH3-VL3-L6-CH1-CL; VL3-VH3-L6-CL-CH1; VH3-VL3-L6-CL-CH1; VL3-CL-L6-VH3-CH1; VL3-CH1-L6-VH3-CL; VH3-CH1-L6-VL3-CL; VH3-CL-L6-VL3-CH1; VL3-VH3-CH1-Fc; VH3-VL3-CH1-Fc; VL3-VH3-CL-Fc; VH3-VL3-CL-Fc; VL3-VH3-CH1-CL-Fc; VH3-VL3-CH1-CL-Fc; VL3-VH3-CL-CH1-Fc; VH3-VL3-CL-CH1-Fc; VL3-CL-VH3-CH1-Fc; VL3-CH1-VH3-CL-Fc; VH3-CH1-VL3-CL-Fc; VH3-CL-VL3-CH1-Fc; VL3-L6-VH3-L7-CH1-Fc; VH3-L6-VL3-L7-CH1-Fc; VL3-L6-VH3-L7-CL-Fc; VH3-L6-VL3-L7-CL-Fe; VL3-L6-VH3-L7-CH1-L8-CL-Fc; VH3-L6-VL3-L7-CH1-L8-CL-Fc; VL3-L6-VH3-L7-CL-L8-CH1-Fc; VH3-L6-VL3-L7-CL-L8-CH1-Fc; VL3-L6-CL-L7-VH3-L8-CH1-Fc; VL3-L6-CH1-L7-VH3-L8-CL-Fc; VH3-L6-CH1-L7-VL3-L8-CL-Fc; VH3-L6-CL-L7-VL3-L8-CH1-Fc; VL3-VH3-L6-CH1-CL-Fc; VH3-VL3-L6-CH1-CL-Fc; VL3-VH3-L6-CL-CH1-Fc; VH3-VL3-L6-CL-CH1-Fc; VL3-CL-L6-VH3-CH1-Fc; VL3-CH1-L6-VH3-CL-Fc; VH3-CH1-L6-VL3-CL-Fc; or VH3-CL-L6-VL3-CH1-Fc. In some aspects, the first polypeptide has a structure represented by VH1-L1-VH2-L2-VL2-L3-VL1-L4-CH1-Fc and the second polypeptide has a structure represented by VL3-VH3; VH3-VL3; VL3-L4-VH3; VH3-L4-VL3; VL3-VH3-Fc; VH3-VL3-Fc; VL3-L4-VH3-Fc; VH3-L4-VL3-Fc; VL3-VH3-CH1; VH3-VL3-CH1; VL3-VH3-CL; VH3-VL3-CL; VL3-VH3-CH1-CL; VH3-VL3-CH1-CL; VL3-VH3-CL-CH1; VH3-VL3-CL-CH1; VL3-CL-VH3-CH1; VL3-CH1-VH3-CL; VH3-CH1-VL3-CL; VH3-CL-VL3-CH1; VL3-L6-VH3-L7-CH1; VH3-L6-VL3-L7-CH1; VL3-L6-VH3-L7-CL; VH3-L6-VL3-L7-CL; VL3-L6-VH3-L7-CH1-L8-CL; VH3-L6-VL3-L7-CH1-L8-CL; VL3-L6-VH3-L7-CL-L8-CH1; VH3-L6-VL3-L7-CL-L8-CH1; VL3-L6-CL-L7-VH3-L8-CH1; VL3-L6-CH1-L7-VH3-L8-CL; VH3-L6-CH1-L7-VL3-L8-CL; VH3-L6-CL-L7-VL3-L8-CH1; VL3-VH3-L6-CH1-CL; VH3-VL3-L6-CH1-CL; VL3-VH3-L6-CL-CH1; VH3-VL3-L6-CL-CH1; VL3-CL-L6-VH3-CH1; VL3-CH1-L6-VH3-CL; VH3-CH1-L6-VL3-CL; VH3-CL-L6-VL3-CH1; VL3-VH3-CH1-Fc; VH3-VL3-CH1-Fc; VL3-VH3-CL-Fc; VH3-VL3-CL-Fc; VL3-VH3-CH1-CL-Fc; VH3-VL3-CH1-CL-Fc; VL3-VH3-CL-CH1-Fc; VH3-VL3-CL-CH1-Fc; VL3-CL-VH3-CH1-Fe; VL3-CH1-VH3-CL-Fc; VH3-CH1-VL3-CL-Fc; VH3-CL-VL3-CH1-Fc; VL3-L6-VH3-L7-CH1-Fc; VH3-L6-VL3-L7-CH1-Fc; VL3-L6-VH3-L7-CL-Fc; VH3-L6-VL3-L7-CL-Fc; VL3-L6-VH3-L7-CH1-L8-CL-Fc; VH3-L6-VL3-L7-CH1-L8-CL-Fc; VL3-L6-VH3-L7-CL-L8-CH1-Fc; VH3-L6-VL3-L7-CL-L8-CH1-Fc; VL3-L6-CL-L7-VH3-L8-CH1-Fe; VL3-L6-CH1-L7-VH3-L8-CL-Fc; VH3-L6-CH1-L7-VL3-L8-CL-Fc; VH3-L6-CL-L7-VL3-L8-CH1-Fc; VL3-VH3-L6-CH1-CL-Fc; VH3-VL3-L6-CH1-CL-Fc; VL3-VH3-L6-CL-CH1-Fc; VH3-VL3-L6-CL-CH1-Fc; VL3-CL-L6-VH3-CH1-Fc; VL3-CH1-L6-VH3-CL-Fc; VH3-CH1-L6-VL3-CL-Fc; or VH3-CL-L6-VL3-CH1-Fc. In some aspects, the first polypeptide has a structure represented by VL1-L1-VL2-L2-VH2-L3-VH1-L4-CL-Fc and the second polypeptide has a structure represented by VL3-VH3; VH3-VL3; VL3-L4-VH3; VH3-L4-VL3; VL3-VH3-Fc; VH3-VL3-Fc; VL3-L4-VH3-Fc; VH3-L4-VL3-Fc; VL3-VH3-CH1; VH3-VL3-CH1; VL3-VH3-CL; VH3-VL3-CL; VL3-VH3-CH1-CL; VH3-VL3-CH1-CL; VL3-VH3-CL-CH1; VH3-VL3-CL-CH1; VL3-CL-VH3-CH1; VL3-CH1-VH3-CL; VH3-CH1-VL3-CL; VH3-CL-VL3-CH1; VL3-L6-VH3-L7-CH1; VH3-L6-VL3-L7-CH1; VL3-L6-VH3-L7-CL; VH3-L6-VL3-L7-CL; VL3-L6-VH3-L7-CH1-L8-CL; VH3-L6-VL3-L7-CH1-L8-CL; VL3-L6-VH3-L7-CL-L8-CH1; VH3-L6-VL3-L7-CL-L8-CH1; VL3-L6-CL-L7-VH3-L8-CH1; VL3-L6-CH1-L7-VH3-L8-CL; VH3-L6-CH1-L7-VL3-L8-CL; VH3-L6-CL-L7-VL3-L8-CH1; VL3-VH3-L6-CH1-CL; VH3-VL3-L6-CH1-CL; VL3-VH3-L6-CL-CH1; VH3-VL3-L6-CL-CH1; VL3-CL-L6-VH3-CH1; VL3-CH1-L6-VH3-CL; VH3-CH1-L6-VL3-CL; VH3-CL-L6-VL3-CH1; VL3-VH3-CH1-Fc; VH3-VL3-CH1-Fc; VL3-VH3-CL-Fc; VH3-VL3-CL-Fc; VL3-VH3-CH1-CL-Fc; VH3-VL3-CH1-CL-Fc; VL3-VH3-CL-CH1-Fc; VH3-VL3-CL-CH1-Fc; VL3-CL-VH3-CH1-Fc; VL3-CH1-VH3-CL-Fc; VH3-CH1-VL3-CL-Fc; VH3-CL-VL3-CH1-Fc; VL3-L6-VH3-L7-CH1-Fc; VH3-L6-VL3-L7-CH1-Fc; VL3-L6-VH3-L7-CL-Fc; VH3-L6-VL3-L7-CL-Fe; VL3-L6-VH3-L7-CH1-L8-CL-Fc; VH3-L6-VL3-L7-CH1-L8-CL-Fc; VL3-L6-VH3-L7-CL-L8-CH1-Fc; VH3-L6-VL3-L7-CL-L8-CH1-Fc; VL3-L6-CL-L7-VH3-L8-CH1-Fc; VL3-L6-CH1-L7-VH3-L8-CL-Fc; VH3-L6-CH1-L7-VL3-L8-CL-Fc; VH3-L6-CL-L7-VL3-L8-CH1-Fc; VL3-VH3-L6-CH1-CL-Fc; VH3-VL3-L6-CH1-CL-Fc; VL3-VH3-L6-CL-CH1-Fc; VH3-VL3-L6-CL-CH1-Fc; VL3-CL-L6-VH3-CH1-Fc; VL3-CH1-L6-VH3-CL-Fc; VH3-CH1-L6-VL3-CL-Fc; or VH3-CL-L6-VL3-CH1-Fc. In some aspects, the first polypeptide has a structure represented by VH1-L1-VH2-L2-VL2-L3-VL1-L4-CL-Fc and the second polypeptide has a structure represented by VL3-VH3; VH3-VL3; VL3-L4-VH3; VH3-L4-VL3; VL3-VH3-Fc; VH3-VL3-Fc; VL3-L4-VH3-Fc; VH3-L4-VL3-Fc; VL3-VH3-CH1; VH3-VL3-CH1; VL3-VH3-CL; VH3-VL3-CL; VL3-VH3-CH1-CL; VH3-VL3-CH1-CL; VL3-VH3-CL-CH1; VH3-VL3-CL-CH1; VL3-CL-VH3-CH1; VL3-CH1-VH3-CL; VH3-CH1-VL3-CL; VH3-CL-VL3-CH1; VL3-L6-VH3-L7-CH1; VH3-L6-VL3-L7-CH1; VL3-L6-VH3-L7-CL; VH3-L6-VL3-L7-CL; VL3-L6-VH3-L7-CH1-L8-CL; VH3-L6-VL3-L7-CH1-L8-CL; VL3-L6-VH3-L7-CL-L8-CH1; VH3-L6-VL3-L7-CL-L8-CH1; VL3-L6-CL-L7-VH3-L8-CH1; VL3-L6-CH1-L7-VH3-L8-CL; VH3-L6-CH1-L7-VL3-L8-CL; VH3-L6-CL-L7-VL3-L8-CH1; VL3-VH3-L6-CH1-CL; VH3-VL3-L6-CH1-CL; VL3-VH3-L6-CL-CH1; VH3-VL3-L6-CL-CH1; VL3-CL-L6-VH3-CH1; VL3-CH1-L6-VH3-CL; VH3-CH1-L6-VL3-CL; VH3-CL-L6-VL3-CH1; VL3-VH3-CH1-Fc; VH3-VL3-CH1-Fc; VL3-VH3-CL-Fc; VH3-VL3-CL-Fc; VL3-VH3-CH1-CL-Fc; VH3-VL3-CH1-CL-Fc; VL3-VH3-CL-CH1-Fc; VH3-VL3-CL-CH1-Fc; VL3-CL-VH3-CH1-Fe; VL3-CH1-VH3-CL-Fc; VH3-CH1-VL3-CL-Fc; VH3-CL-VL3-CH1-Fc; VL3-L6-VH3-L7-CH1-Fc; VH3-L6-VL3-L7-CH1-Fc; VL3-L6-VH3-L7-CL-Fc; VH3-L6-VL3-L7-CL-Fc; VL3-L6-VH3-L7-CH1-L8-CL-Fc; VH3-L6-VL3-L7-CH1-L8-CL-Fc; VL3-L6-VH3-L7-CL-L8-CH1-Fc; VH3-L6-VL3-L7-CL-L8-CH1-Fc; VL3-L6-CL-L7-VH3-L8-CH1-Fe; VL3-L6-CH1-L7-VH3-L8-CL-Fc; VH3-L6-CH1-L7-VL3-L8-CL-Fc; VH3-L6-CL-L7-VL3-L8-CH1-Fc; VL3-VH3-L6-CH1-CL-Fc; VH3-VL3-L6-CH1-CL-Fc; VL3-VH3-L6-CL-CH1-Fc; VH3-VL3-L6-CL-CH1-Fc; VL3-CL-L6-VH3-CH1-Fc; VL3-CH1-L6-VH3-CL-Fc; VH3-CH1-L6-VL3-CL-Fc; or VH3-CL-L6-VL3-CH1-Fc. In some aspects, the first polypeptide has a structure represented by VL1-L1-VL2-L2-VH2-L3-VH1-L4-CH1-L5-CL-Fc and the second polypeptide has a structure represented by VL3-VH3; VH3-VL3; VL3-L4-VH3; VH3-L4-VL3; VL3-VH3-Fc; VH3-VL3-Fc; VL3-L4-VH3-Fc; VH3-L4-VL3-Fc; VL3-VH3-CH1; VH3-VL3-CH1; VL3-VH3-CL; VH3-VL3-CL; VL3-VH3-CH1-CL; VH3-VL3-CH1-CL; VL3-VH3-CL-CH1; VH3-VL3-CL-CH1; VL3-CL-VH3-CH1; VL3-CH1-VH3-CL; VH3-CH1-VL3-CL; VH3-CL-VL3-CH1; VL3-L6-VH3-L7-CH1; VH3-L6-VL3-L7-CH1; VL3-L6-VH3-L7-CL; VH3-L6-VL3-L7-CL; VL3-L6-VH3-L7-CH1-L8-CL; VH3-L6-VL3-L7-CH1-L8-CL; VL3-L6-VH3-L7-CL-L8-CH1; VH3-L6-VL3-L7-CL-L8-CH1; VL3-L6-CL-L7-VH3-L8-CH1; VL3-L6-CH1-L7-VH3-L8-CL; VH3-L6-CH1-L7-VL3-L8-CL; VH3-L6-CL-L7-VL3-L8-CH1; VL3-VH3-L6-CH1-CL; VH3-VL3-L6-CH1-CL; VL3-VH3-L6-CL-CH1; VH3-VL3-L6-CL-CH1; VL3-CL-L6-VH3-CH1; VL3-CH1-L6-VH3-CL; VH3-CH1-L6-VL3-CL; VH3-CL-L6-VL3-CH1; VL3-VH3-CH1-Fc; VH3-VL3-CH1-Fc; VL3-VH3-CL-Fc; VH3-VL3-CL-Fc; VL3-VH3-CH1-CL-Fc; VH3-VL3-CH1-CL-Fc; VL3-VH3-CL-CH1-Fc; VH3-VL3-CL-CH1-Fc; VL3-CL-VH3-CH1-Fc; VL3-CH1-VH3-CL-Fc; VH3-CH1-VL3-CL-Fc; VH3-CL-VL3-CH1-Fc; VL3-L6-VH3-L7-CH1-Fc; VH3-L6-VL3-L7-CH1-Fc; VL3-L6-VH3-L7-CL-Fc; VH3-L6-VL3-L7-CL-Fc; VL3-L6-VH3-L7-CH1-L8-CL-Fc; VH3-L6-VL3-L7-CH1-L8-CL-Fc; VL3-L6-VH3-L7-CL-L8-CH1-Fc; VH3-L6-VL3-L7-CL-L8-CH1-Fc; VL3-L6-CL-L7-VH3-L8-CH1-Fc; VL3-L6-CH1-L7-VH3-L8-CL-Fc; VH3-L6-CH1-L7-VL3-L8-CL-Fc; VH3-L6-CL-L7-VL3-L8-CH1-Fc; VL3-VH3-L6-CH1-CL-Fc; VH3-VL3-L6-CH1-CL-Fc; VL3-VH3-L6-CL-CH1-Fc; VH3-VL3-L6-CL-CH1-Fc; VL3-CL-L6-VH3-CH1-Fc; VL3-CH1-L6-VH3-CL-Fc; VH3-CH1-L6-VL3-CL-Fc; or VH3-CL-L6-VL3-CH1-Fe. In some aspects, the first polypeptide has a structure represented by VH1-L1-VH2-L2-VL2-L3-VL1-L4-CH1-L5-CL-Fc and the second polypeptide has a structure represented by VL3-VH3; VH3-VL3; VL3-L4-VH3; VH3-L4-VL3; VL3-VH3-Fc; VH3-VL3-Fc; VL3-L4-VH3-Fc; VH3-L4-VL3-Fc; VL3-VH3-CH1; VH3-VL3-CH1; VL3-VH3-CL; VH3-VL3-CL; VL3-VH3-CH1-CL; VH3-VL3-CH1-CL; VL3-VH3-CL-CH1; VH3-VL3-CL-CH1; VL3-CL-VH3-CH1; VL3-CH1-VH3-CL; VH3-CH1-VL3-CL; VH3-CL-VL3-CH1; VL3-L6-VH3-L7-CH1; VH3-L6-VL3-L7-CH1; VL3-L6-VH3-L7-CL; VH3-L6-VL3-L7-CL; VL3-L6-VH3-L7-CH1-L8-CL; VH3-L6-VL3-L7-CH1-L8-CL; VL3-L6-VH3-L7-CL-L8-CH1; VH3-L6-VL3-L7-CL-L8-CH1; VL3-L6-CL-L7-VH3-L8-CH1; VL3-L6-CH1-L7-VH3-L8-CL; VH3-L6-CH1-L7-VL3-L8-CL; VH3-L6-CL-L7-VL3-L8-CH1; VL3-VH3-L6-CH1-CL; VH3-VL3-L6-CH1-CL; VL3-VH3-L6-CL-CH1; VH3-VL3-L6-CL-CH1; VL3-CL-L6-VH3-CH1; VL3-CH1-L6-VH3-CL; VH3-CH1-L6-VL3-CL; VH3-CL-L6-VL3-CH1; VL3-VH3-CH1-Fc; VH3-VL3-CH1-Fc; VL3-VH3-CL-Fc; VH3-VL3-CL-Fc; VL3-VH3-CH1-CL-Fc; VH3-VL3-CH1-CL-Fc; VL3-VH3-CL-CH1-Fc; VH3-VL3-CL-CH1-Fc; VL3-CL-VH3-CH1-Fc; VL3-CH1-VH3-CL-Fc; VH3-CH1-VL3-CL-Fc; VH3-CL-VL3-CH1-Fc; VL3-L6-VH3-L7-CH1-Fc; VH3-L6-VL3-L7-CH1-Fc; VL3-L6-VH3-L7-CL-Fc; VH3-L6-VL3-L7-CL-Fe; VL3-L6-VH3-L7-CH1-L8-CL-Fc; VH3-L6-VL3-L7-CH1-L8-CL-Fc; VL3-L6-VH3-L7-CL-L8-CH1-Fc; VH3-L6-VL3-L7-CL-L8-CH1-Fc; VL3-L6-CL-L7-VH3-L8-CH1-Fc; VL3-L6-CH1-L7-VH3-L8-CL-Fc; VH3-L6-CH1-L7-VL3-L8-CL-Fc; VH3-L6-CL-L7-VL3-L8-CH1-Fc; VL3-VH3-L6-CH1-CL-Fc; VH3-VL3-L6-CH1-CL-Fc; VL3-VH3-L6-CL-CH1-Fc; VH3-VL3-L6-CL-CH1-Fc; VL3-CL-L6-VH3-CH1-Fc; VL3-CH1-L6-VH3-CL-Fc; VH3-CH1-L6-VL3-CL-Fc; or VH3-CL-L6-VL3-CH1-Fe. In some aspects, the first polypeptide has a structure represented by VL1-L1-VL2-L2-VH2-L3-VH1-L4-CL-L5-CH1-Fc and the second polypeptide has a structure represented by VL3-VH3; VH3-VL3; VL3-L4-VH3; VH3-L4-VL3; VL3-VH3-Fc; VH3-VL3-Fc; VL3-L4-VH3-Fc; VH3-L4-VL3-Fc; VL3-VH3-CH1; VH3-VL3-CH1; VL3-VH3-CL; VH3-VL3-CL; VL3-VH3-CH1-CL; VH3-VL3-CH1-CL; VL3-VH3-CL-CH1; VH3-VL3-CL-CH1; VL3-CL-VH3-CH1; VL3-CH1-VH3-CL; VH3-CH1-VL3-CL; VH3-CL-VL3-CH1; VL3-L6-VH3-L7-CH1; VH3-L6-VL3-L7-CH1; VL3-L6-VH3-L7-CL; VH3-L6-VL3-L7-CL; VL3-L6-VH3-L7-CH1-L8-CL; VH3-L6-VL3-L7-CH1-L8-CL; VL3-L6-VH3-L7-CL-L8-CH1; VH3-L6-VL3-L7-CL-L8-CH1; VL3-L6-CL-L7-VH3-L8-CH1; VL3-L6-CH1-L7-VH3-L8-CL; VH3-L6-CH1-L7-VL3-L8-CL; VH3-L6-CL-L7-VL3-L8-CH1; VL3-VH3-L6-CH1-CL; VH3-VL3-L6-CH1-CL; VL3-VH3-L6-CL-CH1; VH3-VL3-L6-CL-CH1; VL3-CL-L6-VH3-CH1; VL3-CH1-L6-VH3-CL; VH3-CH1-L6-VL3-CL; VH3-CL-L6-VL3-CH1; VL3-VH3-CH1-Fc; VH3-VL3-CH1-Fc; VL3-VH3-CL-Fc; VH3-VL3-CL-Fc; VL3-VH3-CH1-CL-Fc; VH3-VL3-CH1-CL-Fc; VL3-VH3-CL-CH1-Fc; VH3-VL3-CL-CH1-Fc; VL3-CL-VH3-CH1-Fe; VL3-CH1-VH3-CL-Fc; VH3-CH1-VL3-CL-Fc; VH3-CL-VL3-CH1-Fc; VL3-L6-VH3-L7-CH1-Fc; VH3-L6-VL3-L7-CH1-Fc; VL3-L6-VH3-L7-CL-Fc; VH3-L6-VL3-L7-CL-Fc; VL3-L6-VH3-L7-CH1-L8-CL-Fc; VH3-L6-VL3-L7-CH1-L8-CL-Fc; VL3-L6-VH3-L7-CL-L8-CH1-Fc; VH3-L6-VL3-L7-CL-L8-CH1-Fc; VL3-L6-CL-L7-VH3-L8-CH1-Fe; VL3-L6-CH1-L7-VH3-L8-CL-Fc; VH3-L6-CH1-L7-VL3-L8-CL-Fc; VH3-L6-CL-L7-VL3-L8-CH1-Fc; VL3-VH3-L6-CH1-CL-Fc; VH3-VL3-L6-CH1-CL-Fc; VL3-VH3-L6-CL-CH1-Fc; VH3-VL3-L6-CL-CH1-Fc; VL3-CL-L6-VH3-CH1-Fc; VL3-CH1-L6-VH3-CL-Fc; VH3-CH1-L6-VL3-CL-Fc; or VH3-CL-L6-VL3-CH1-Fc. In some aspects, the first polypeptide has a structure represented by VH1-L1-VH2-L2-VL2-L3-VL1-L4-CL-L5-CH1-Fc and the second polypeptide has a structure represented by VL3-VH3; VH3-VL3; VL3-L4-VH3; VH3-L4-VL3; VL3-VH3-Fc; VH3-VL3-Fc; VL3-L4-VH3-Fc; VH3-L4-VL3-Fc; VL3-VH3-CH1; VH3-VL3-CH1; VL3-VH3-CL; VH3-VL3-CL; VL3-VH3-CH1-CL; VH3-VL3-CH1-CL; VL3-VH3-CL-CH1; VH3-VL3-CL-CH1; VL3-CL-VH3-CH1; VL3-CH1-VH3-CL; VH3-CH1-VL3-CL; VH3-CL-VL3-CH1; VL3-L6-VH3-L7-CH1; VH3-L6-VL3-L7-CH1; VL3-L6-VH3-L7-CL; VH3-L6-VL3-L7-CL; VL3-L6-VH3-L7-CH1-L8-CL; VH3-L6-VL3-L7-CH1-L8-CL; VL3-L6-VH3-L7-CL-L8-CH1; VH3-L6-VL3-L7-CL-L8-CH1; VL3-L6-CL-L7-VH3-L8-CH1; VL3-L6-CH1-L7-VH3-L8-CL; VH3-L6-CH1-L7-VL3-L8-CL; VH3-L6-CL-L7-VL3-L8-CH1; VL3-VH3-L6-CH1-CL; VH3-VL3-L6-CH1-CL; VL3-VH3-L6-CL-CH1; VH3-VL3-L6-CL-CH1; VL3-CL-L6-VH3-CH1; VL3-CH1-L6-VH3-CL; VH3-CH1-L6-VL3-CL; VH3-CL-L6-VL3-CH1; VL3-VH3-CH1-Fc; VH3-VL3-CH1-Fc; VL3-VH3-CL-Fc; VH3-VL3-CL-Fc; VL3-VH3-CH1-CL-Fc; VH3-VL3-CH1-CL-Fc; VL3-VH3-CL-CH1-Fc; VH3-VL3-CL-CH1-Fc; VL3-CL-VH3-CH1-Fc; VL3-CH1-VH3-CL-Fc; VH3-CH1-VL3-CL-Fc; VH3-CL-VL3-CH1-Fc; VL3-L6-VH3-L7-CH1-Fc; VH3-L6-VL3-L7-CH1-Fc; VL3-L6-VH3-L7-CL-Fc; VH3-L6-VL3-L7-CL-Fc; VL3-L6-VH3-L7-CH1-L8-CL-Fc; VH3-L6-VL3-L7-CH1-L8-CL-Fc; VL3-L6-VH3-L7-CL-L8-CH1-Fc; VH3-L6-VL3-L7-CL-L8-CH1-Fc; VL3-L6-CL-L7-VH3-L8-CH1-Fc; VL3-L6-CH1-L7-VH3-L8-CL-Fc; VH3-L6-CH1-L7-VL3-L8-CL-Fc; VH3-L6-CL-L7-VL3-L8-CH1-Fc; VL3-VH3-L6-CH1-CL-Fc; VH3-VL3-L6-CH1-CL-Fc; VL3-VH3-L6-CL-CH1-Fc; VH3-VL3-L6-CL-CH1-Fc; VL3-CL-L6-VH3-CH1-Fc; VL3-CH1-L6-VH3-CL-Fc; VH3-CH1-L6-VL3-CL-Fc; or VH3-CL-L6-VL3-CH1-Fe. The VL1, VL2, VL3, VH1, VH2, and/or VH3 may specifically bind to A2AR, APRIL, ATPDase, BAFF, BAFFR, BCMA, BlyS, BTK, BTLA, B7DC, B7H1, B7H2, B7H3, B7H4, B7H5, B7H6, B7H7, B7RP1, B7-4, C3, C5, CCL2, CCL3, CCL4, CCL5, CCL7, CCL8, CCL11, CCL15, CCL17, CCL19, CCL20, CCL21, CCL25 CCR3, CCR4, CD3, CD19, CD20, CD24, CD27, CD28, CD38, CD39, CD40, CD40L, CD47, CD52, CD70, CD80, CD86, CD123, CD133, CD137, CD137L, CD160, CD272, CEACAM5, CLEC9, CLEC91, CRTH2, CSF-1, CSF-2, CSF-3, CXCL1, CXCL2, CXCL4, CXCL12, CXCL13, CXCR3, cMet, CTLA4, DLL3, DNGR-1, E-cadherin, EGFR, ENTPD1, EpCAM, FCER1, FCER1A, FCER2, FGFR, FLAP, FOLH1, Gi24, GITR, GITRL, GPR5, HER2, HER3, ICOSL, ICOS, HHLA2, HMGB1, HVEM, IDO, IFNa, IgE, IGF1R, IL2Rbeta, ILL, IL1A, IL1B, IL1F10, IL2, IL4, IL4Ra, IL5, IL5R, IL6, IL7, IL7Ra, IL8, IL9, IL9R, IL10, rhIL10, IL12, IL13, IL13Ra1, IL13Ra2, IL15, IL17, IL17Rb, IL18, IL22, IL23, IL25, IL7, IL33, IL35, ITGB4, ITK, KIR, LAG3, LAMP1, leptin, LPFS2, MHC class II, MUC-1, MUC-16, NCR3LG1, NKG2D, NKp46, NTPDase-1, OX40, OX40L, PD-1, PD-L1, PD-L2, PROM1, S152, SIRPalpha, SISP1, SLC, SPG64, ST2, STEAP1, STEAP2, Syk kinase, STEAP1, TROP2, TACI, TDO, T14, TIGIT, TIM3, TLR, TLR2, TLR4, TLR5, TLR9, TMEF1, TNFa, TNFRSF7, Tp55, TREM1, TSLP, TSLPR, TWEAK, VEGF, VISTA, Vstm3, WUCAM, DLL4, TGFbeta, GP100, GPRC5D, CD30 or CD16A. For the avoidance of doubt, all the antigen binding polypeptide complex structures described herein can be combined with any one or more of the targets described herein. Any and all disclosure herein in relation to targets for antigen binding polypeptides of the invention is generally applicable, and applies equally and without reservation to each and every antigen binding polypeptide and antigen binding polypeptide complex described herein. For the avoidance of doubt, the VL1, VL2, VL3, VH1, VH2, and/or VH3 of each and every antigen binding polypeptide and antigen binding polypeptide complex described herein may independently bind to any one of said particularly preferred targets.

[0173] In other aspects, the invention is directed to an antigen binding polypeptide complex comprising a first polypeptide, a second polypeptide, and a third polypeptide; wherein the first polypeptide has a structure represented by VL1-VL2-VH2-VH1; VH1-VH2-VL2-VL1; VL1-L1-VL2-L2-VH2-L3-VH1; or VH1-L1-VH2-L2-VL2-L3-VL1; wherein the second polypeptide has a structure represented by VL3; wherein the third polypeptide has a structure represented by VH3; wherein VL1 is a first immunoglobulin light chain variable region that specifically binds to A2AR, APRIL, ATPDase, BAFF, BAFFR, BCMA, BlyS, BTK, BTLA, B7DC, B7H1, B7H2, B7H3, B7H4, B7H5, B7H6, B7H7, B7RP1, B7-4, C3, C5, CCL2, CCL3, CCL4, CCL5, CCL7, CCL8, CCL11, CCL15, CCL17, CCL19, CCL20, CCL21, CCL25 CCR3, CCR4, CD3, CD19, CD20, CD24, CD27, CD28, CD38, CD39, CD40, CD40L, CD47, CD52, CD70, CD80, CD86, CD123, CD133, CD137, CD137L, CD160, CD272, CEACAM5, CLEC9, CLEC91, CRTH2, CSF-1, CSF-2, CSF-3, CXCL1, CXCL2, CXCL4, CXCL12, CXCL13, CXCR3, cMet, CTLA4, DLL3, DNGR-1, E-cadherin, EGFR, ENTPD1, EpCAM, FCER1, FCER1A, FCER2, FGFR, FLAP, FOLH1, Gi24, GITR, GITRL, GPR5, HER2, HER3, ICOSL, ICOS, HHLA2, HMGB1, HVEM, IDO, IFNa, IgE, IGF1R, IL2Rbeta, R1, IL1A, IL1B, IL1F10, IL2, R4, IL4Ra, IL5, IL5R, IL6, IL7, IL7Ra, IL8, IL9, IL9R, IL10, rhIL10, IR12, IL13, IL13Ra1, IL13Ra2, IL15, IL17, R17Rb, IL18, IL22, IL23, IL25, IL7, IL33, IL35, ITGB4, ITK, KIR, LAG3, LAMP1, leptin, LPFS2, MHC class II, MUC-1, MUC-16, NCR3LG1, NKG2D, NKp46, NTPDase-1, OX40, OX40L, PD-1, PD-L1, PD-L2, PROM1, S152, SIRPalpha, SISP1, SLC, SPG64, ST2, STEAP1, STEAP2, Syk kinase, STEAP1, TROP2, TACI, TDO, T14, TIGIT, TIM3, TLR, TLR2, TLR4, TLRS, TLR9, TMEF1, TNFa, TNFRSF7, Tp55, TREM1, TSLP, TSLPR, TWEAK, VEGF, VISTA, Vstm3, WUCAM, DLL4, TGFbeta, GP100, GPRC5D, CD30 or CD16A; VL2 is a second immunoglobulin light chain variable region that specifically binds to A2AR, APRIL, ATPDase, BAFF, BAFFR, BCMA, BlyS, BTK, BTLA, B7DC, B7H1, B7H2, B7H3, B7H4, B7H5, B7H6, B7H7, B7RP1, B7-4, C3, C5, CCL2, CCL3, CCL4, CCL5, CCL7, CCL8, CCL11, CCL15, CCL17, CCL19, CCL20, CCL21, CCL25 CCR3, CCR4, CD3, CD19, CD20, CD24, CD27, CD28, CD38, CD39, CD40, CD40L, CD47, CD52, CD70, CD80, CD86, CD123, CD133, CD137, CD137L, CD160, CD272, CEACAM5, CLEC9, CLEC91, CRTH2, CSF-1, CSF-2, CSF-3, CXCL1, CXCL2, CXCL4, CXCL12, CXCL13, CXCR3, cMet, CTLA4, DLL3, DNGR-1, E-cadherin, EGFR, ENTPD1, EpCAM, FCER1, FCER1A, FCER2, FGFR, FLAP, FOLH1, Gi24, GITR, GITRL, GPR5, HER2, HER3, ICOSL, ICOS, HHLA2, HMGB1, HVEM, IDO, IFNa, IgE, IGF1R, IL2Rbeta, IL1, IL1A, IL1B, ILF10, IL2, IL4, IL4Ra, IL5, IL5R, IL6, IL7, IL7Ra, IL8, IL9, IL9R, IL10, rhIL10, IL12, IL13, IL13Ra1, IL13Ra2, IL15, IL17, IL17Rb, IL18, IL22, IL23, IL25, IL7, IL33, IL35, ITGB4, ITK, KIR, LAG3, LAMP1, leptin, LPFS2, MHC class II, MUC-1, MUC-16, NCR3LG1, NKG2D, NKp46, NTPDase-1, OX40, OX40L, PD-1, PD-L1, PD-L2, PROM1, S152, SIRPalpha, SISP1, SLC, SPG64, ST2, STEAP1, STEAP2, Syk kinase, STEAP1, TROP2, TACI, TDO, T14, TIGIT, TIM3, TLR, TLR2, TLR4, TLRS, TLR9, TMEF1, TNFa, TNFRSF7, Tp55, TREM1, TSLP, TSLPR, TWEAK, VEGF, VISTA, Vstm3, WUCAM, DLL4, TGFbeta, GP100, GPRC5D, CD30 or CD16A; VL3 is a third immunoglobulin light chain variable region that specifically binds to A2AR, APRIL, ATPDase, BAFF, BAFFR, BCMA, BlyS, BTK, BTLA, B7DC, B7H1, B7H2, B7H3, B7H4, B7H5, B7H6, B7H7, B7RP1, B7-4, C3, C5, CCL2, CCL3, CCL4, CCL5, CCL7, CCL8, CCL11, CCL15, CCL17, CCL19, CCL20, CCL21, CCL25 CCR3, CCR4, CD3, CD19, CD20, CD24, CD27, CD28, CD38, CD39, CD40, CD40L, CD47, CD52, CD70, CD80, CD86, CD123, CD133, CD137, CD137L, CD160, CD272, CEACAM5, CLEC9, CLEC91, CRTH2, CSF-1, CSF-2, CSF-3, CXCL1, CXCL2, CXCL4, CXCL12, CXCL13, CXCR3, cMet, CTLA4, DLL3, DNGR-1, E-cadherin, EGFR, ENTPD1, EpCAM, FCER1, FCER1A, FCER2, FGFR, FLAP, FOLH1, Gi24, GITR, GITRL, GPR5, HER2, HER3, ICOSL, ICOS, HHLA2, HMGB1, HVEM, IDO, IFNa, IgE, IGF1R, I2Rbeta, IL1, IL1A, IL1B, IL1F10, IL2, IL4, IL4Ra, IL5, IL5R, IL6, IL7, IL7Ra, IL8, IL9, IL9R, IL10, rhIL10, IL12, IL13, IL13Ra1, IL13Ra2, IL15, IL17, IL17Rb, IL18, IL22, IL23, IL25, IL7, IL33, IL35, ITGB4, ITK, KIR, LAG3, LAMP1, leptin, LPFS2, MHC class II, MUC-1, MUC-16, NCR3LG1, NKG2D, NKp46, NTPDase-1, OX40, OX40L, PD-1, PD-L1, PD-L2, PROM1, S152, SIRPalpha, SISP1, SLC, SPG64, ST2, STEAP1, STEAP2, Syk kinase, STEAP1, TROP2, TACI, TDO, T14, TIGIT, TIM3, TLR, TLR2, TLR4, TLR5, TLR9, TMEF1, TNFa, TNFRSF7, Tp55, TREM1, TSLP, TSLPR, TWEAK, VEGF, VISTA, Vstm3, WUCAM, DLL4, TGFbeta, GP100, GPRC5D, CD30 or CD16A; VH1 is a first immunoglobulin heavy chain variable region that specifically binds to A2AR, APRIL, ATPDase, BAFF, BAFFR, BCMA, BlyS, BTK, BTLA, B7DC, B7H1, B7H2, B7H3, B7H4, B7H5, B7H6, B7H7, B7RP1, B7-4, C3, C5, CCL2, CCL3, CCL4, CCL5, CCL7, CCL8, CCL11, CCL15, CCL17, CCL19, CCL20, CCL21, CCL25 CCR3, CCR4, CD3, CD19, CD20, CD24, CD27, CD28, CD38, CD39, CD40, CD40L, CD47, CD52, CD70, CD80, CD86, CD123, CD133, CD137, CD137L, CD160, CD272, CEACAM5, CLEC9, CLEC91, CRTH2, CSF-1, CSF-2, CSF-3, CXCL1, CXCL2, CXCL4, CXCL12, CXCL13, CXCR3, cMet, CTLA4, DLL3, DNGR-1, E-cadherin, EGFR, ENTPD1, EpCAM, FCER1, FCER1A, FCER2, FGFR, FLAP, FOLH1, Gi24, GITR, GITRL, GPR5, HER2, HER3, ICOSL, ICOS, HHLA2, HMGB1, HVEM, IDO, IFNa, IgE, IGF1R, IL2Rbeta, IL1, IL1A, IL1B, IL1F10, IL2, IL4, IL4Ra, IL5, IL5R, IL6, IL7, IL7Ra, IL8, IL9, IL9R, IL10, rhIL10, IL12, IL13, R13Ra1, IL13Ra2, IL15, IL17, IL17Rb, IL18, IL22, IL23, IL25, IL7, IL33, IL35, ITGB4, ITK, KIR, LAG3, LAMP1, leptin, LPFS2, MHC class II, MUC-1, MUC-16, NCR3LG1, NKG2D, NKp46, NTPDase-1, OX40, OX40L, PD-1, PD-L1, PD-L2, PROM1, S152, SIRPalpha, SISP1, SLC, SPG64, ST2, STEAP1, STEAP2, Syk kinase, STEAP1, TROP2, TACI, TDO, T14, TIGIT, TIM3, TLR, TLR2, TLR4, TLR5, TLR9, TMEF1, TNFa, TNFRSF7, Tp55, TREM1, TSLP, TSLPR, TWEAK, VEGF, VISTA, Vstm3, WUCAM, DLL4, TGFbeta, GP100, GPRC5D, CD30 or CD16A; VH2 is a second immunoglobulin heavy chain variable region that specifically binds to A2AR, APRIL, ATPDase, BAFF, BAFFR, BCMA, BlyS, BTK, BTLA, B7DC, B7H1, B7H2, B7H3, B7H4, B7H5, B7H6, B7H7, B7RP1, B7-4, C3, C5, CCL2, CCL3, CCL4, CCL5, CCL7, CCL8, CCL11, CCL15, CCL17, CCL19, CCL20, CCL21, CCL25 CCR3, CCR4, CD3, CD19, CD20, CD24, CD27, CD28, CD38, CD39, CD40, CD40L, CD47, CD52, CD70, CD80, CD86, CD123, CD133, CD137, CD137L, CD160, CD272, CEACAM5, CLEC9, CLEC91, CRTH2, CSF-1, CSF-2, CSF-3, CXCLL, CXCL2, CXCL4, CXCL12, CXCL13, CXCR3, cMet, CTLA4, DLL3, DNGR-1, E-cadherin, EGFR, ENTPD1, EpCAM, FCER1, FCER1A, FCER2, FGFR, FLAP, FOLH1, Gi24, GITR, GITRL, GPR5, HER2, HER3, ICOSL, ICOS, HHLA2, HMGB1, HVEM, IDO, IFNa, IgE, IGF1R, I2Rbeta, IL1, IL1A, IL1B, IL1F10, IL2, IL4, IL4Ra, IL5, IL5R, IL6, IL7, IL7Ra, IL8, IL9, IL9R, IL10, rhIL10, IL12, IL13, IL13Ra1, IL13Ra2, IL15, IR17, IL17Rb, IL18, IL22, IL23, IL25, IL7, IL33, IL35, ITGB4, ITK, KIR, LAG3, LAMP1, leptin, LPFS2, MHC class II, MUC-1, MUC-16, NCR3LG1, NKG2D, NKp46, NTPDase-1, OX40, OX40L, PD-1, PD-L1, PD-L2, PROM1, S152, SIRPalpha, SISP1, SLC, SPG64, ST2, STEAP1, STEAP2, Syk kinase, STEAP1, TROP2, TACI, TDO, T14, TIGIT, TIM3, TLR, TLR2, TLR4, TLR5, TLR9, TMEF1, TNFa, TNFRSF7, Tp55, TREM1, TSLP, TSLPR, TWEAK, VEGF, VISTA, Vstm3, WUCAM, DLL4, TGFbeta, GP100, GPRC5D, CD30 or CD16A; VH3 is a third immunoglobulin heavy chain variable region that specifically binds to A2AR, APRIL, ATPDase, BAFF, BAFFR, BCMA, BlyS, BTK, BTLA, B7DC, B7H1, B7H2, B7H3, B7H4, B7H5, B7H6, B7H7, B7RP1, B7-4, C3, C5, CCL2, CCL3, CCL4, CCL5, CCL7, CCL8, CCL11, CCL15, CCL17, CCL19, CCL20, CCL21, CCL25 CCR3, CCR4, CD3, CD19, CD20, CD24, CD27, CD28, CD38, CD39, CD40, CD40L, CD47, CD52, CD70, CD80, CD86, CD123, CD133, CD137, CD137L, CD160, CD272, CEACAM5, CLEC9, CLEC91, CRTH2, CSF-1, CSF-2, CSF-3, CXCL1, CXCL2, CXCL4, CXCL12, CXCL13, CXCR3, cMet, CTLA4, DLL3, DNGR-1, E-cadherin, EGFR, ENTPD1, EpCAM, FCER1, FCER1A, FCER2, FGFR, FLAP, FOLH1, Gi24, GITR, GITRL, GPR5, HER2, HER3, ICOSL, ICOS, HHLA2, HMGB1, HVEM, IDO, IFNa, IgE, IGF1R, IL2Rbeta, IL1, IL1A, IL1B, IL1F10, IL2, IL4, IL4Ra, IL5, IL5R, IL6, IL7, IL7Ra, IL8, I9, IL9R, IL10, rhIL10, IL12, IL13, IL13Ra1, IL13Ra2, IL15, IL17, IL17Rb, IL18, IL22, IL23, IL25, IL7, IL33, IL35, ITGB4, ITK, KIR, LAG3, LAMP1, leptin, LPFS2, MHC class II, MUC-1, MUC-16, NCR3LG1, NKG2D, NKp46, NTPDase-1, OX40, OX40L, PD-1, PD-L1, PD-L2, PROM1, S152, SIRPalpha, SISP1, SLC, SPG64, ST2, STEAP1, STEAP2, Syk kinase, STEAP1, TROP2, TACI, TDO, T14, TIGIT, TIM3, TLR, TLR2, TLR4, TLR5, TLR9, TMEF1, TNFa, TNFRSF7, Tp55, TREM1, TSLP, TSLPR, TWEAK, VEGF, VISTA, Vstm3, WUCAM, DLL4, TGFbeta, GP100, GPRC5D, CD30 or CD16A; and L1, L2 and L3 are amino acid linkers. The VL1, VL2, VL3, VH1, VH2, and/or VH3 may specifically bind to A2AR, APRIL, ATPDase, BAFF, BAFFR, BCMA, BlyS, BTK, BTLA, B7DC, B7H1, B7H2, B7H3, B7H4, B7H5, B7H6, B7H7, B7RP1, B7-4, C3, C5, CCL2, CCL3, CCL4, CCL5, CCL7, CCL8, CCLI1, CCL15, CCL17, CCL19, CCL20, CCL21, CCL25 CCR3, CCR4, CD3, CD19, CD20, CD24, CD27, CD28, CD38, CD39, CD40, CD40L, CD47, CD52, CD70, CD80, CD86, CD123, CD133, CD137, CD137L, CD160, CD272, CEACAM5, CLEC9, CLEC91, CRTH2, CSF-1, CSF-2, CSF-3, CXCL1, CXCL2, CXCL4, CXCL12, CXCL13, CXCR3, cMet, CTLA4, DLL3, DNGR-1, E-cadherin, EGFR, ENTPD1, EpCAM, FCER1, FCER1A, FCER2, FGFR, FLAP, FOLH1, Gi24, GITR, GITRL, GPR5, HER2, HER3, ICOSL, ICOS, HHLA2, HMGB1, HVEM, IDO, IFNa, IgE, IGF1R, IL2Rbeta, IL1, IL1A, IL1B, IL1F10, IL2, IL4, IL4Ra, IL5, IL5R, IL6, IL7, IL7Ra, IL8, IL9, IL9R, IL10, rhIL10, IL12, IL13, IL13Ra1, IL13Ra2, IL15, IL17, IL17Rb, IL18, IL22, IL23, IL25, IL7, IL33, IL35, ITGB4, ITK, KIR, LAG3, LAMP1, leptin, LPFS2, MHC class II, MUC-1, MUC-16, NCR3LG1, NKG2D, NKp46, NTPDase-1, OX40, OX40L, PD-1, PD-L1, PD-L2, PROM1, S152, SIRPalpha, SISP1, SLC, SPG64, ST2, STEAP1, STEAP2, Syk kinase, STEAP1, TROP2, TACI, TDO, T14, TIGIT, TIM3, TLR, TLR2, TLR4, TLRS, TLR9, TMEF1, TNFa, TNFRSF7, Tp55, TREM1, TSLP, TSLPR, TWEAK, VEGF, VISTA, Vstm3, WUCAM, DLL4, TGFbeta, GP100, GPRC5D, CD30 or CD16A. For the avoidance of doubt, all the antigen binding polypeptide complex structures described herein can be combined with any one or more of the targets described herein. Any and all disclosure herein in relation to targets for antigen binding polypeptides of the invention is generally applicable, and applies equally and without reservation to each and every antigen binding polypeptide and antigen binding polypeptide complex described herein. For the avoidance of doubt, the VL1, VL2, VL3, VH1, VH2, and/or VH3 of each and every antigen binding polypeptide and antigen binding polypeptide complex described herein may independently bind to any one of said particularly preferred targets.

[0174] In other aspects, the invention is directed to an antigen binding polypeptide complex comprising a first polypeptide, a second polypeptide, and a third polypeptide; wherein the first polypeptide has a structure represented by VL1-VL2-VH2-VH1-Fc; VH1-VH2-VL2-VL1-Fc; VL1-L1-VL2-L2-VH2-L3-VH1-Fc; VH1-L1-VH2-L2-VL2-L3-VL1-Fc; VL1-L1-VL2-L2-VH2-L3-VH1-L4-Fc; or VH1-L1-VH2-L2-VL2-L3-VL1-L4-Fc; wherein the second polypeptide has a structure represented by VL3-Fc or VL3-L1-Fc; wherein the third polypeptide has a structure represented by VH3 or VH3-L1; wherein VL1 is a first immunoglobulin light chain variable region that specifically binds to A2AR, APRIL, ATPDase, BAFF, BAFFR, BCMA, BlyS, BTK, BTLA, B7DC, B7H1, B7H2, B7H3, B7H4, B7H5, B7H6, B7H7, B7RP1, B7-4, C3, C5, CCL2, CCL3, CCL4, CCL5, CCL7, CCL8, CCL11, CCL15, CCL17, CCL19, CCL20, CCL21, CCL25 CCR3, CCR4, CD3, CD19, CD20, CD24, CD27, CD28, CD38, CD39, CD40, CD40L, CD47, CD52, CD70, CD80, CD86, CD123, CD133, CD137, CD137L, CD160, CD272, CEACAM5, CLEC9, CLEC91, CRTH2, CSF-1, CSF-2, CSF-3, CXCL1, CXCL2, CXCL4, CXCL12, CXCL13, CXCR3, cMet, CTLA4, DLL3, DNGR-1, E-cadherin, EGFR, ENTPD1, EpCAM, FCER1, FCER1A, FCER2, FGFR, FLAP, FOLH1, Gi24, GITR, GITRL, GPR5, HER2, HER3, ICOSL, ICOS, HHLA2, HMGB1, HVEM, IDO, IFNa, IgE, IGF1R, IL2Rbeta, IL1, IL1A, IL1B, ILF10, IL2, IL4, IL4Ra, IL5, IL5R, IL6, IL7, IL7Ra, IL8, IL9, IL9R, IL10, rhIL10, IL12, IL13, IL13Ra1, IL13Ra2, IL15, IL17, IL7Rb, IL18, IL22, IL23, IL25, IL7, IL33, IL35, ITGB4, ITK, KIR, LAG3, LAMP1, leptin, LPFS2, MHC class II, MUC-1, MUC-16, NCR3LG1, NKG2D, NKp46, NTPDase-1, OX40, OX40L, PD-1, PD-L1, PD-L2, PROM1, S152, SIRPalpha, SISP1, SLC, SPG64, ST2, STEAP1, STEAP2, Syk kinase, STEAP1, TROP2, TACI, TDO, T14, TIGIT, TIM3, TLR, TLR2, TLR4, TLR5, TLR9, TMEF1, TNFa, TNFRSF7, Tp55, TREM1, TSLP, TSLPR, TWEAK, VEGF, VISTA, Vstm3, WUCAM, DLL4, TGFbeta, GP100, GPRC5D, CD30 or CD16A; VL2 is a second immunoglobulin light chain variable region that specifically binds to A2AR, APRIL, ATPDase, BAFF, BAFFR, BCMA, BlyS, BTK, BTLA, B7DC, B7H1, B7H2, B7H3, B7H4, B7H5, B7H6, B7H7, B7RP1, B7-4, C3, C5, CCL2, CCL3, CCL4, CCL5, CCL7, CCL8, CCL11, CCL15, CCL17, CCL19, CCL20, CCL21, CCL25 CCR3, CCR4, CD3, CD19, CD20, CD24, CD27, CD28, CD38, CD39, CD40, CD40L, CD47, CD52, CD70, CD80, CD86, CD123, CD133, CD137, CD137L, CD160, CD272, CEACAM5, CLEC9, CLEC91, CRTH2, CSF-1, CSF-2, CSF-3, CXCL1, CXCL2, CXCL4, CXCL12, CXCL13, CXCR3, cMet, CTLA4, DLL3, DNGR-1, E-cadherin, EGFR, ENTPD1, EpCAM, FCER1, FCER1A, FCER2, FGFR, FLAP, FOLH1, Gi24, GITR, GITRL, GPR5, HER2, HER3, ICOSL, ICOS, HHLA2, HMGB1, HVEM, IDO, IFNa, IgE, IGF1R, IL2Rbeta, IL1, IL1A, IL1B, IL1F10, IL2, IL4, IL4Ra, IL5, IL5R, IL16, IL7, IL7Ra, IL8, IL9, IL9R, I110, rhIL10, IL12, IL13, IL13Ra1, IL13Ra2, IL15, IL17, IL17Rb, IL18, IL22, IL23, IL25, IL17, IL33, IL35, ITGB4, ITK, KIR, LAG3, LAMP1, leptin, LPFS2, MHC class II, MUC-1, MUC-16, NCR3LG1, NKG2D, NKp46, NTPDase-1, OX40, OX40L, PD-1, PD-L1, PD-L2, PROM1, S1S2, SIRPalpha, SISP1, SLC, SPG64, ST2, STEAP1, STEAP2, Syk kinase, STEAP1, TROP2, TACI, TDO, T14, TIGIT, TIM3, TLR, TLR2, TLR4, TLR5, TLR9, TMEF1, TNFa, TNFRSF7, Tp55, TREM1, TSLP, TSLPR, TWEAK, VEGF, VISTA, Vstm3, WUCAM, DLL4, TGFbeta, GP100, GPRC5D, CD30 or CD16A; VL3 is a third immunoglobulin light chain variable region that specifically binds to A2AR, APRIL, ATPDase, BAFF, BAFFR, BCMA, BlyS, BTK, BTLA, B7DC, B7H1, B7H2, B7H3, B7H4, B7H5, B7H6, B7H7, B7RP1, B7-4, C3, C5, CCL2, CCL3, CCL4, CCL5, CCL7, CCL8, CCL11, CCL15, CCL17, CCL19, CCL20, CCL21, CCL25 CCR3, CCR4, CD3, CD19, CD20, CD24, CD27, CD28, CD38, CD39, CD40, CD40L, CD47, CD52, CD70, CD80, CD86, CD123, CD133, CD137, CD137L, CD160, CD272, CEACAM5, CLEC9, CLEC91, CRTH2, CSF-1, CSF-2, CSF-3, CXCL1, CXCL2, CXCL4, CXCL12, CXCL13, CXCR3, cMet, CTLA4, DLL3, DNGR-1, E-cadherin, EGFR, ENTPD1, EpCAM, FCER1, FCER1A, FCER2, FGFR, FLAP, FOLH1, Gi24, GITR, GITRL, GPR5, HER2, HER3, ICOSL, ICOS, HHLA2, HMGB1, HVEM, IDO, IFNa, IgE, IGF1R, IL2Rbeta, IL1, IL1A, IL1B, IL1F10, IL12, IL14, I14Ra, IL5, IL5R, IL16, 117, IL7Ra, IL8, 119, IL9R, IL10, rhIL10, IL12, IL13, I13Ra1, IL13Ra2, IL15, IL17, IL17Rb, IL18, IL22, IL23, IL25, 117, IL33, IL35, ITGB4, ITK, KIR, LAG3, LAMP1, leptin, LPFS2, MHC class II, MUC-1, MUC-16, NCR3LG1, NKG2D, NKp46, NTPDase-1, OX40, OX40L, PD-1, PD-L1, PD-L2, PROM1, S152, SIRPalpha, SISP1, SLC, SPG64, ST2, STEAP1, STEAP2, Syk kinase, STEAP1, TROP2, TACI, TDO, T14, TIGIT, TIM3, TLR, TLR2, TLR4, TLR5, TLR9, TMEF1, TNFa, TNFRSF7, Tp55, TREM1, TSLP, TSLPR, TWEAK, VEGF, VISTA, Vstm3, WUCAM, DLL4, TGFbeta, GP100, GPRC5D, CD30 or CD16A; VH1 is a first immunoglobulin heavy chain variable region that specifically binds to A2AR, APRIL, ATPDase, BAFF, BAFFR, BCMA, BlyS, BTK, BTLA, B7DC, B7H1, B7H2, B7H3, B7H4, B7H5, B7H6, B7H7, B7RP1, B7-4, C3, C5, CCL2, CCL3, CCL4, CCL5, CCL7, CCL8, CCL11, CCL15, CCL17, CCL19, CCL20, CCL21, CCL25 CCR3, CCR4, CD3, CD19, CD20, CD24, CD27, CD28, CD38, CD39, CD40, CD40L, CD47, CD52, CD70, CD80, CD86, CD123, CD133, CD137, CD137L, CD160, CD272, CEACAM5, CLEC9, CLEC91, CRTH2, CSF-1, CSF-2, CSF-3, CXCL1, CXCL2, CXCL4, CXCL12, CXCL13, CXCR3, cMet, CTLA4, DLL3, DNGR-1, E-cadherin, EGFR, ENTPD1, EpCAM, FCER1, FCER1A, FCER2, FGFR, FLAP, FOLH1, Gi24, GITR, GITRL, GPR5, HER2, HER3, ICOSL, ICOS, HHLA2, HMGB1, HVEM, IDO, IFNa, IgE, IGF1R, IL2Rbeta, IL1, IL1A, IL1B, IL1F10, IL2, IL4, IL4Ra, IL5, IL5R, IL6, IL7, IL7Ra, IL8, IL9, IL9R, IL10, rhIL10, IL12, IL13, IL13Ra1, IL13Ra2, IL15, IL17, IL17Rb, IL18, IL22, IL23, IL25, IL7, IL33, IL35, ITGB4, ITK, KIR, LAG3, LAMP1, leptin, LPFS2, MHC class II, MUC-1, MUC-16, NCR3LG1, NKG2D, NKp46, NTPDase-1, OX40, OX40L, PD-1, PD-L1, PD-L2, PROM1, S1S2, SIRPalpha, SISP1, SLC, SPG64, ST2, STEAP1, STEAP2, Syk kinase, STEAP1, TROP2, TACI, TDO, T14, TIGIT, TIM3, TLR, TLR2, TLR4, TLR5, TLR9, TMEF1, TNFa, TNFRSF7, Tp55, TREM1, TSLP, TSLPR, TWEAK, VEGF, VISTA, Vstm3, WUCAM, DLL4, TGFbeta, GP100, GPRC5D, CD30 or CD16A; VH2 is a second immunoglobulin heavy chain variable region that specifically binds to A2AR, APRIL, ATPDase, BAFF, BAFFR, BCMA, BlyS, BTK, BTLA, B7DC, B7H1, B7H2, B7H3, B7H4, B7H5, B7H6, B7H7, B7RP1, B7-4, C3, C5, CCL2, CCL3, CCL4, CCL5, CCL7, CCL8, CCL11, CCL15, CCL17, CCL19, CCL20, CCL21, CCL25 CCR3, CCR4, CD3, CD19, CD20, CD24, CD27, CD28, CD38, CD39, CD40, CD40L, CD47, CD52, CD70, CD80, CD86, CD123, CD133, CD137, CD137L, CD160, CD272, CEACAM5, CLEC9, CLEC91, CRTH2, CSF-1, CSF-2, CSF-3, CXCL1, CXCL2, CXCL4, CXCL12, CXCL13, CXCR3, cMet, CTLA4, DLL3, DNGR-1, E-cadherin, EGFR, ENTPD1, EpCAM, FCER1, FCER1A, FCER2, FGFR, FLAP, FOLH1, Gi24, GITR, GITRL, GPR5, HER2, HER3, ICOSL, ICOS, HHLA2, HMGB1, HVEM, IDO, IFNa, IgE, IGF1R, IL2Rbeta, IL1, IL1A, IL1B, IL1F10, IL2, IL4, IL4Ra, IL5, IL5R, IL6, IL7, IL7Ra, IL8, IL9, IL9R, IL10, rhIL10, IL12, IL13, IL13Ra1, IL13Ra2, IL15, IL17, IL17Rb, IL18, IL22, IL23, IL25, IL7, IL33, IL35, ITGB4, ITK, KIR, LAG3, LAMP1, leptin, LPFS2, MHC class II, MUC-1, MUC-16, NCR3LG1, NKG2D, NKp46, NTPDase-1, OX40, OX40L, PD-1, PD-L1, PD-L2, PROM1, S152, SIRPalpha, SISP1, SLC, SPG64, ST2, STEAP1, STEAP2, Syk kinase, STEAP1, TROP2, TACI, TDO, T14, TIGIT, TIM3, TLR, TLR2, TLR4, TLR5, TLR9, TMEF1, TNFa, TNFRSF7, Tp55, TREM1, TSLP, TSLPR, TWEAK, VEGF, VISTA, Vstm3, WUCAM, DLL4, TGFbeta, GP100, GPRC5D, CD30 or CD16A; VH3 is a third immunoglobulin heavy chain variable region that specifically binds to A2AR, APRIL, ATPDase, BAFF, BAFFR, BCMA, BlyS, BTK, BTLA, B7DC, B7H1, B7H2, B7H3, B7H4, B7H5, B7H6, B7H7, B7RP1, B7-4, C3, C5, CCL2, CCL3, CCL4, CCL5, CCL7, CCL8, CCL11, CCL15, CCL17, CCL19, CCL20, CCL21, CCL25 CCR3, CCR4, CD3, CD19, CD20, CD24, CD27, CD28, CD38, CD39, CD40, CD40L, CD47, CD52, CD70, CD80, CD86, CD123, CD133, CD137, CD137L, CD160, CD272, CEACAM5, CLEC9, CLEC91, CRTH2, CSF-1, CSF-2, CSF-3, CXCL1, CXCL2, CXCL4, CXCL12, CXCL13, CXCR3, cMet, CTLA4, DLL3, DNGR-1, E-cadherin, EGFR, ENTPD1, EpCAM, FCER1, FCER1A, FCER2, FGFR, FLAP, FOLH1, Gi24, GITR, GITRL, GPR5, HER2, HER3, ICOSL, ICOS, HHLA2, HMGB1, HVEM, IDO, IFNa, IgE, IGF1R, IL2Rbeta, IL1, IL1A, IL1B, IL1F10, IL2, IL4, IL4Ra, IL5, IL5R, IL6, IL7, IL7Ra, IL8, IL9, IL9R, IL10, rhIL10, IL12, IL13, IL13Ra1, IL13Ra2, IL15, IL17, IL17Rb, IL18, IL22, IL23, IL25, IL7, IL33, IL35, ITGB4, ITK, KIR, LAG3, LAMP1, leptin, LPFS2, MHC class II, MUC-1, MUC-16, NCR3LG1, NKG2D, NKp46, NTPDase-1, OX40, OX40L, PD-1, PD-L1, PD-L2, PROM1, S152, SIRPalpha, SISP1, SLC, SPG64, ST2, STEAP1, STEAP2, Syk kinase, STEAP1, TROP2, TACI, TDO, T14, TIGIT, TIM3, TLR, TLR2, TLR4, TLR5, TLR9, TMEF1, TNFa, TNFRSF7, Tp55, TREM1, TSLP, TSLPR, TWEAK, VEGF, VISTA, Vstm3, WUCAM, DLL4, TGFbeta, GP100, GPRC5D, CD30 or CD16A; Fc is a region comprising an immunoglobulin heavy chain constant region 2 (CH2), an immunoglobulin heavy chain constant region 3 (CH3), and optionally, an immunoglobulin hinge; and L1, L2, L3 and L4 are amino acid linkers. In some aspects, the first polypeptide has a structure represented by VL1-VL2-VH2-VH1-Fc; VH1-VH2-VL2-VL1-Fc; VL1-L1-VL2-L2-VH2-L3-VH1-Fc; VH1-L1-VH2-L2-VL2-L3-VL1-Fc; VL1-L1-VL2-L2-VH2-L3-VH1-L4-Fc; or VH1-L1-VH2-L2-VL2-L3-VL1-L4-Fc, the second polypeptide has a structure represented by VL3-Fc, and the third polypeptide has a structure represented by VH3.

[0175] In some aspects, the first polypeptide has a structure represented by VL1-VL2-VH2-VH1-Fc; VH1-VH2-VL2-VL1-Fc; VL1-L1-VL2-L2-VH2-L3-VH1-Fc; VH1-L1-VH2-L2-VL2-L3-VL1-Fc; VL1-L1-VL2-L2-VH2-L3-VH1-L4-Fc; or VH1-L1-VH2-L2-VL2-L3-VL1-L4-Fc, the second polypeptide has a structure represented by VL3-Fc, and the third polypeptide has a structure represented by VH3-L1. In some aspects, the first polypeptide has a structure represented by VL1-VL2-VH2-VH1-Fc; VH1-VH2-VL2-VL1-Fc; VL1-L1-VL2-L2-VH2-L3-VH1-Fc; VH1-L1-VH2-L2-VL2-L3-VL1-Fc; VL1-L1-VL2-L2-VH2-L3-VH1-L4-Fc; or VH1-L1-VH2-L2-VL2-L3-VL1-L4-Fc, the second polypeptide has a structure represented by VL3-L1-Fc, and the third polypeptide has a structure represented by VH3. In some aspects, the first polypeptide has a structure represented by VL1-VL2-VH2-VH1-Fc; VH1-VH2-VL2-VL1-Fc; VL1-L1-VL2-L2-VH2-L3-VH1-Fc; VH1-L1-VH2-L2-VL2-L3-VL1-Fc; VL1-L1-VL2-L2-VH2-L3-VH1-L4-Fc; or VH1-L1-VH2-L2-VL2-L3-VL1-L4-Fc, the second polypeptide has a structure represented by VL3-L1-Fc, and the third polypeptide has a structure represented by VH3-LL. The VL1, VL2, VL3, VH1, VH2, and/or VH3 may specifically bind to A2AR, APRIL, ATPDase, BAFF, BAFFR, BCMA, BlyS, BTK, BTLA, B7DC, B7H1, B7H2, B7H3, B7H4, B7H5, B7H6, B7H7, B7RP1, B7-4, C3, C5, CCL2, CCL3, CCL4, CCL5, CCL7, CCL8, CCLI1, CCL15, CCL17, CCL19, CCL20, CCL21, CCL25 CCR3, CCR4, CD3, CD19, CD20, CD24, CD27, CD28, CD38, CD39, CD40, CD40L, CD47, CD52, CD70, CD80, CD86, CD123, CD133, CD137, CD137L, CD160, CD272, CEACAM5, CLEC9, CLEC91, CRTH2, CSF-1, CSF-2, CSF-3, CXCL1, CXCL2, CXCL4, CXCL12, CXCL13, CXCR3, cMet, CTLA4, DLL3, DNGR-1, E-cadherin, EGFR, ENTPD1, EpCAM, FCER1, FCER1A, FCER2, FGFR, FLAP, FOLH1, Gi24, GITR, GITRL, GPR5, HER2, HER3, ICOSL, ICOS, HHLA2, HMGB1, HVEM, IDO, IFNa, IgE, IGF1R, IL2Rbeta, IL1, IL1A, IL1B, IL1F10, IL2, IL4, IL4Ra, IL5, IL5R, IL6, IL7, IL7Ra, IL8, IL9, IL9R, IL10, rhIL10, IL12, IL13, IL13Ra1, IL13Ra2, I115, IL17, IL17Rb, IL18, IL22, IL23, IL25, IL7, IL33, IL35, ITGB4, ITK, KIR, LAG3, LAMP1, leptin, LPFS2, MHC class II, MUC-1, MUC-16, NCR3LG1, NKG2D, NKp46, NTPDase-1, OX40, OX40L, PD-1, PD-L1, PD-L2, PROM1, S152, SIRPalpha, SISP1, SLC, SPG64, ST2, STEAP1, STEAP2, Syk kinase, STEAP1, TROP2, TACI, TDO, T14, TIGIT, TIM3, TLR, TLR2, TLR4, TLR5, TLR9, TMEF1, TNFa, TNFRSF7, Tp55, TREM1, TSLP, TSLPR, TWEAK, VEGF, VISTA, Vstm3, WUCAM, DLL4, TGFbeta, GP100, GPRC5D, CD30 or CD16A. For the avoidance of doubt, all the antigen binding polypeptide complex structures described herein can be combined with any one or more of the targets described herein. Any and all disclosure herein in relation to targets for antigen binding polypeptides of the invention is generally applicable, and applies equally and without reservation to each and every antigen binding polypeptide and antigen binding polypeptide complex described herein. For the avoidance of doubt, the VL1, VL2, VL3, VH1, VH2, and/or VH3 of each and every antigen binding polypeptide and antigen binding polypeptide complex described herein may independently bind to any one of said particularly preferred targets.

[0176] In other aspects, the invention is directed to an antigen binding polypeptide complex comprising a first polypeptide, a second polypeptide, and a third polypeptide; wherein the first polypeptide has a structure represented by VL1-VL2-VH2-VH1-Fc; VH1-VH2-VL2-VL1-Fc; VL1-L1-VL2-L2-VH2-L3-VH1-Fc; VH1-L1-VH2-L2-VL2-L3-VL1-Fc; VL1-L1-VL2-L2-VH2-L3-VH1-L4-Fc; or VH1-L1-VH2-L2-VL2-L3-VL1-L4-Fc; wherein the second polypeptide has a structure represented by VL3 or VL3-L1; wherein the third polypeptide has a structure represented by VH3-Fc or VH3-L1-Fc; wherein VL1 is a first immunoglobulin light chain variable region that specifically binds to A2AR, APRIL, ATPDase, BAFF, BAFFR, BCMA, BlyS, BTK, BTLA, B7DC, B7H1, B7H2, B7H3, B7H4, B7H5, B7H6, B7H7, B7RP1, B7-4, C3, C5, CCL2, CCL3, CCL4, CCL5, CCL7, CCL8, CCL11, CCL15, CCL17, CCL19, CCL20, CCL21, CCL25 CCR3, CCR4, CD3, CD19, CD20, CD24, CD27, CD28, CD38, CD39, CD40, CD40L, CD47, CD52, CD70, CD80, CD86, CD123, CD133, CD137, CD137L, CD160, CD272, CEACAM5, CLEC9, CLEC91, CRTH2, CSF-1, CSF-2, CSF-3, CXCL1, CXCL2, CXCL4, CXCL12, CXCL13, CXCR3, cMet, CTLA4, DLL3, DNGR-1, E-cadherin, EGFR, ENTPD1, EpCAM, FCER1, FCER1A, FCER2, FGFR, FLAP, FOLH1, Gi24, GITR, GITRL, GPR5, HER2, HER3, ICOSL, ICOS, HHLA2, HMGB1, HVEM, IDO, IFNa, IgE, IGF1R, IL2Rbeta, IL1, IL1A, IL1B, IL1F10, IL2, IL4, IL4Ra, IL5, IL5R, IL6, IL7, IL7Ra, IL8, IL9, IL9R, IL10, rhIL10, IL12, IL13, IL13Ra1, IL13Ra2, 1L15, IL17, IL17Rb, IL18, IL22, IL23, IL25, IL7, IL33, IL35, ITGB4, ITK, KIR, LAG3, LAMP1, leptin, LPFS2, MHC class II, MUC-1, MUC-16, NCR3LG1, NKG2D, NKp46, NTPDase-1, OX40, OX40L, PD-1, PD-L1, PD-L2, PROM1, S152, SIRPalpha, SISP1, SLC, SPG64, ST2, STEAP1, STEAP2, Syk kinase, STEAP1, TROP2, TACI, TDO, T14, TIGIT, TIM3, TLR, TLR2, TLR4, TLR5, TLR9, TMEF1, TNFa, TNFRSF7, Tp55, TREM1, TSLP, TSLPR, TWEAK, VEGF, VISTA, Vstm3, WUCAM, DLL4, TGFbeta, GP100, GPRC5D, CD30 or CD16A; VL2 is a second immunoglobulin light chain variable region that specifically binds to A2AR, APRIL, ATPDase, BAFF, BAFFR, BCMA, BlyS, BTK, BTLA, B7DC, B7H1, B7H2, B7H3, B7H4, B7H5, B7H6, B7H7, B7RP1, B7-4, C3, C5, CCL2, CCL3, CCL4, CCL5, CCL7, CCL8, CCL11, CCL15, CCL17, CCL19, CCL20, CCL21, CCL25 CCR3, CCR4, CD3, CD19, CD20, CD24, CD27, CD28, CD38, CD39, CD40, CD40L, CD47, CD52, CD70, CD80, CD86, CD123, CD133, CD137, CD137L, CD160, CD272, CEACAM5, CLEC9, CLEC91, CRTH2, CSF-1, CSF-2, CSF-3, CXCL1, CXCL2, CXCL4, CXCL12, CXCL13, CXCR3, cMet, CTLA4, DLL3, DNGR-1, E-cadherin, EGFR, ENTPD1, EpCAM, FCER1, FCER1A, FCER2, FGFR, FLAP, FOLH1, Gi24, GITR, GITRL, GPR5, HER2, HER3, ICOSL, ICOS, HHLA2, HMGB1, HVEM, IDO, IFNa, IgE, IGF1R, IL2Rbeta, IL1, IL1A, IL1B, IL1F10, IL2, IL4, IL4Ra, IL5, IL5R, IL6, IL7, IL7Ra, IL8, IL9, IL9R, IL10, rhIL10, IL12, IL13, IL13Ra1, IL13Ra2, IL15, IL17, IL17Rb, IL18, IL22, IL23, IL25, IL7, IL33, IL35, ITGB4, ITK, KIR, LAG3, LAMP1, leptin, LPFS2, MHC class II, MUC-1, MUC-16, NCR3LG1, NKG2D, NKp46, NTPDase-1, OX40, OX40L, PD-1, PD-L1, PD-L2, PROM1, S1S2, SIRPalpha, SISP1, SLC, SPG64, ST2, STEAP1, STEAP2, Syk kinase, STEAP1, TROP2, TACI, TDO, T14, TIGIT, TIM3, TLR, TLR2, TLR4, TLR5, TLR9, TMEF1, TNFa, TNFRSF7, Tp55, TREM1, TSLP, TSLPR, TWEAK, VEGF, VISTA, Vstm3, WUCAM, DLL4, TGFbeta, GP100, GPRC5D, CD30 or CD16A; VL3 is a third immunoglobulin light chain variable region that specifically binds to A2AR, APRIL, ATPDase, BAFF, BAFFR, BCMA, BlyS, BTK, BTLA, B7DC, B7H1, B7H2, B7H3, B7H4, B7H5, B7H6, B7H7, B7RP1, B7-4, C3, C5, CCL2, CCL3, CCL4, CCL5, CCL7, CCL8, CCL11, CCL15, CCL17, CCL19, CCL20, CCL21, CCL25 CCR3, CCR4, CD3, CD19, CD20, CD24, CD27, CD28, CD38, CD39, CD40, CD40L, CD47, CD52, CD70, CD80, CD86, CD123, CD133, CD137, CD137L, CD160, CD272, CEACAM5, CLEC9, CLEC91, CRTH2, CSF-1, CSF-2, CSF-3, CXCL1, CXCL2, CXCL4, CXCL12, CXCL13, CXCR3, cMet, CTLA4, DLL3, DNGR-1, E-cadherin, EGFR, ENTPD1, EpCAM, FCER1, FCER1A, FCER2, FGFR, FLAP, FOLH1, Gi24, GITR, GITRL, GPR5, HER2, HER3, ICOSL, ICOS, HHLA2, HMGB1, HVEM, IDO, IFNa, IgE, IGF1R, IL2Rbeta, IL1, IL1A, IL1B, IL1F10, IL2, IL4, IL4Ra, IL5, IL5R, IL6, IL7, IL7Ra, IL8, IL9, IL9R, IL10, rhIL10, IL12, IL13, IL13Ra1, IL13Ra2, IL15, IL17, IL17Rb, IL18, IL22, IL23, IL25, IL7, IL33, IL35, ITGB4, ITK, KIR, LAG3, LAMP1, leptin, LPFS2, MHC class II, MUC-1, MUC-16, NCR3LG1, NKG2D, NKp46, NTPDase-1, OX40, OX40L, PD-1, PD-L1, PD-L2, PROM1, S152, SIRPalpha, SISP1, SLC, SPG64, ST2, STEAP1, STEAP2, Syk kinase, STEAP1, TROP2, TACI, TDO, T14, TIGIT, TIM3, TLR, TLR2, TLR4, TLR5, TLR9, TMEF1, TNFa, TNFRSF7, Tp55, TREM1, TSLP, TSLPR, TWEAK, VEGF, VISTA, Vstm3, WUCAM, DLL4, TGFbeta, GP100, GPRC5D, CD30 or CD16A; VH1 is a first immunoglobulin heavy chain variable region that specifically binds to A2AR, APRIL, ATPDase, BAFF, BAFFR, BCMA, BlyS, BTK, BTLA, B7DC, B7H1, B7H2, B7H3, B7H4, B7H5, B7H6, B7H7, B7RP1, B7-4, C3, C5, CCL2, CCL3, CCL4, CCL5, CCL7, CCL8, CCL11, CCL15, CCL17, CCL19, CCL20, CCL21, CCL25 CCR3, CCR4, CD3, CD19, CD20, CD24, CD27, CD28, CD38, CD39, CD40, CD40L, CD47, CD52, CD70, CD80, CD86, CD123, CD133, CD137, CD137L, CD160, CD272, CEACAM5, CLEC9, CLEC91, CRTH2, CSF-1, CSF-2, CSF-3, CXCL1, CXCL2, CXCL4, CXCL12, CXCL13, CXCR3, cMet, CTLA4, DLL3, DNGR-1, E-cadherin, EGFR, ENTPD1, EpCAM, FCER1, FCER1A, FCER2, FGFR, FLAP, FOLH1, Gi24, GITR, GITRL, GPR5, HER2, HER3, ICOSL, ICOS, HHLA2, HMGB1, HVEM, IDO, IFNa, IgE, IGF1R, IL2Rbeta, IL1, IL1A, IL1B, IL1F10, IL2, IL4, IL4Ra, IL5, IL5R, IL6, IL7, IL7Ra, IL8, IL9, IL9R, IL10, rhIL10, IL12, IL13, IL13Ra1, IL13Ra2, IL15, IL17, IL17Rb, IL18, IL22, IL23, IL25, IL7, IL33, IL35, ITGB4, ITK, KIR, LAG3, LAMP1, leptin, LPFS2, MHC class II, MUC-1, MUC-16, NCR3LG1, NKG2D, NKp46, NTPDase-1, OX40, OX40L, PD-1, PD-L1, PD-L2, PROM1, S152, SIRPalpha, SISP1, SLC, SPG64, ST2, STEAP1, STEAP2, Syk kinase, STEAP1, TROP2, TACI, TDO, T14, TIGIT, TIM3, TLR, TLR2, TLR4, TLR5, TLR9, TMEF1, TNFa, TNFRSF7, Tp55, TREM1, TSLP, TSLPR, TWEAK, VEGF, VISTA, Vstm3, WUCAM, DLL4, TGFbeta, GP100, GPRC5D, CD30 or CD16A; VH2 is a second immunoglobulin heavy chain variable region that specifically binds to A2AR, APRIL, ATPDase, BAFF, BAFFR, BCMA, BlyS, BTK, BTLA, B7DC, B7H1, B7H2, B7H3, B7H4, B7H5, B7H6, B7H7, B7RP1, B7-4, C3, C5, CCL2, CCL3, CCL4, CCL5, CCL7, CCL8, CCL11, CCL15, CCL17, CCL19, CCL20, CCL21, CCL25 CCR3, CCR4, CD3, CD19, CD20, CD24, CD27, CD28, CD38, CD39, CD40, CD40L, CD47, CD52, CD70, CD80, CD86, CD123, CD133, CD137, CD137L, CD160, CD272, CEACAM5, CLEC9, CLEC91, CRTH2, CSF-1, CSF-2, CSF-3, CXCL1, CXCL2, CXCL4, CXCL12, CXCL13, CXCR3, cMet, CTLA4, DLL3, DNGR-1, E-cadherin, EGFR, ENTPD1, EpCAM, FCER1, FCER1A, FCER2, FGFR, FLAP, FOLH1, Gi24, GITR, GITRL, GPR5, HER2, HER3, ICOSL, ICOS, HHLA2, HMGB1, HVEM, IDO, IFNa, IgE, IGF1R, IL2Rbeta, IL1, IL1A, IL1B, IL1F10, IL2, IL4, IL4Ra, IL5, IL5R, IL6, IL7, IL7Ra, IL8, IL9, IL9R, IL10, rhIL10, IL12, IL13, IL13Ra1, IL13Ra2, IL15, IL17, IL17Rb, IL18, IL22, IL23, IL25, IL7, IL33, IL35, ITGB4, ITK, KIR, LAG3, LAMP1, leptin, LPFS2, MHC class II, MUC-1, MUC-16, NCR3LG1, NKG2D, NKp46, NTPDase-1, OX40, OX40L, PD-1, PD-L1, PD-L2, PROM1, S152, SIRPalpha, SISP1, SLC, SPG64, ST2, STEAP1, STEAP2, Syk kinase, STEAP1, TROP2, TACI, TDO, T14, TIGIT, TIM3, TLR, TLR2, TLR4, TLR5, TLR9, TMEF1, TNFa, TNFRSF7, Tp55, TREM1, TSLP, TSLPR, TWEAK, VEGF, VISTA, Vstm3, WUCAM, DLL4, TGFbeta, GP100, GPRC5D, CD30 or CD16A; VH3 is a third immunoglobulin heavy chain variable region that specifically binds to A2AR, APRIL, ATPDase, BAFF, BAFFR, BCMA, BlyS, BTK, BTLA, B7DC, B7H1, B7H2, B7H3, B7H4, B7H5, B7H6, B7H7, B7RP1, B7-4, C3, C5, CCL2, CCL3, CCL4, CCL5, CCL7, CCL8, CCL11, CCL15, CCL17, CCL19, CCL20, CCL21, CCL25 CCR3, CCR4, CD3, CD19, CD20, CD24, CD27, CD28, CD38, CD39, CD40, CD40L, CD47, CD52, CD70, CD80, CD86, CD123, CD133, CD137, CD137L, CD160, CD272, CEACAM5, CLEC9, CLEC91, CRTH2, CSF-1, CSF-2, CSF-3, CXCL1, CXCL2, CXCL4, CXCL12, CXCL13, CXCR3, cMet, CTLA4, DLL3, DNGR-1, E-cadherin, EGFR, ENTPD1, EpCAM, FCER1, FCER1A, FCER2, FGFR, FLAP, FOLH1, Gi24, GITR, GITRL, GPR5, HER2, HER3, ICOSL, ICOS, HHLA2, HMGB1, HVEM, IDO, IFNa, IgE, IGF1R, IL2Rbeta, IL1, IL1A, IL1B, IL1F10, IL2, IL4, IL4Ra, IL5, IL5R, IL6, IL7, IL7Ra, IL8, IL9, IL9R, IL10, rhIL10, IL12, IL13, IL13Ra1, IL13Ra2, IL15, IL17, IL17Rb, IL18, IL22, IL23, IL25, IL7, IL33, IL35, ITGB4, ITK, KIR, LAG3, LAMP1, leptin, LPFS2, MHC class II, MUC-1, MUC-16, NCR3LG1, NKG2D, NKp46, NTPDase-1, OX40, OX40L, PD-1, PD-L1, PD-L2, PROM1, S152, SIRPalpha, SISP1, SLC, SPG64, ST2, STEAP1, STEAP2, Syk kinase, STEAP1, TROP2, TACI, TDO, T14, TIGIT, TIM3, TLR, TLR2, TLR4, TLR5, TLR9, TMEF1, TNFa, TNFRSF7, Tp55, TREM1, TSLP, TSLPR, TWEAK, VEGF, VISTA, Vstm3, WUCAM, DLL4, TGFbeta, GP100, GPRC5D, CD30 or CD16A; Fc is a region comprising an immunoglobulin heavy chain constant region 2 (CH2), an immunoglobulin heavy chain constant region 3 (CH3), and optionally, an immunoglobulin hinge; and L1, L2, L3 and L4 are amino acid linkers. In some aspects, the first polypeptide has a structure represented by VL1-VL2-VH2-VH1-Fc, the second polypeptide has a structure represented by VL3, and the third polypeptide has a structure represented by VH3-Fc. In some aspects, the first polypeptide has a structure represented by VL1-VL2-VH2-VH1-Fc, the second polypeptide has a structure represented by VL3-L1, and the third polypeptide has a structure represented by VH3-Fc. In some aspects, the first polypeptide has a structure represented by VL1-VL2-VH2-VH1-Fc, the second polypeptide has a structure represented by VL3, and the third polypeptide has a structure represented by VH3-L1-Fc. In some aspects, the first polypeptide has a structure represented by VL1-VL2-VH2-VH1-Fc, the second polypeptide has a structure represented by VL3-L1, and the third polypeptide has a structure represented by VH3-L1-Fc. In some aspects, the first polypeptide has a structure represented by VH1-VH2-VL2-VL1-Fc, the second polypeptide has a structure represented by VL3, and the third polypeptide has a structure represented by VH3-Fc. In some aspects, the first polypeptide has a structure represented by VH1-VH2-VL2-VL1-Fc, the second polypeptide has a structure represented by VL3-L1, and the third polypeptide has a structure represented by VH3-Fc. In some aspects, the first polypeptide has a structure represented by VH1-VH2-VL2-VL1-Fc, the second polypeptide has a structure represented by VL3, and the third polypeptide has a structure represented by VH3-L1-Fc. In some aspects, the first polypeptide has a structure represented by VH1-VH2-VL2-VL1-Fc, the second polypeptide has a structure represented by VL3-L1, and the third polypeptide has a structure represented by VH3-L1-Fc. In some aspects, the first polypeptide has a structure represented by VL1-L1-VL2-L2-VH2-L3-VH1-Fc, the second polypeptide has a structure represented by VL3, and the third polypeptide has a structure represented by VH3-Fc. In some aspects, the first polypeptide has a structure represented by VL1-L1-VL2-L2-VH2-L3-VH1-Fc, the second polypeptide has a structure represented by VL3-L1, and the third polypeptide has a structure represented by VH3-Fc. In some aspects, the first polypeptide has a structure represented by VL1-L1-VL2-L2-VH2-L3-VH1-Fc, the second polypeptide has a structure represented by VL3, and the third polypeptide has a structure represented by VH3-L1-Fc. In some aspects, the first polypeptide has a structure represented by VL1-L1-VL2-L2-VH2-L3-VH1-Fc, the second polypeptide has a structure represented by VL3-L1, and the third polypeptide has a structure represented by VH3-L1-Fc. In some aspects, the first polypeptide has a structure represented by VH1-L1-VH2-L2-VL2-L3-VL1-Fc, the second polypeptide has a structure represented by VL3, and the third polypeptide has a structure represented by VH3-Fc. In some aspects, the first polypeptide has a structure represented by VH1-L1-VH2-L2-VL2-L3-VL1-Fc, the second polypeptide has a structure represented by VL3-L1, and the third polypeptide has a structure represented by VH3-Fc. In some aspects, the first polypeptide has a structure represented by VH1-L1-VH2-L2-VL2-L3-VL1-Fc, the second polypeptide has a structure represented by VL3, and the third polypeptide has a structure represented by VH3-L1-Fc. In some aspects, the first polypeptide has a structure represented by VH1-L1-VH2-L2-VL2-L3-VL1-Fc, the second polypeptide has a structure represented by VL3-L1, and the third polypeptide has a structure represented by VH3-L1-Fc. In some aspects, the first polypeptide has a structure represented by VL1-L1-VL2-L2-VH2-L3-VH1-L4-Fc, the second polypeptide has a structure represented by VL3, and the third polypeptide has a structure represented by VH3-Fc. In some aspects, the first polypeptide has a structure represented by VL1-L1-VL2-L2-VH2-L3-VH1-L4-Fc, the second polypeptide has a structure represented by VL3-L1, and the third polypeptide has a structure represented by VH3-Fc. In some aspects, the first polypeptide has a structure represented by VL1-L1-VL2-L2-VH2-L3-VH1-L4-Fc, the second polypeptide has a structure represented by VL3, and the third polypeptide has a structure represented by VH3-L1-Fc. In some aspects, the first polypeptide has a structure represented by VL1-L1-VL2-L2-VH2-L3-VH1-L4-Fc, the second polypeptide has a structure represented by VL3-L1, and the third polypeptide has a structure represented by VH3-L1-Fc. In some aspects, the first polypeptide has a structure represented by VH1-L1-VH2-L2-VL2-L3-VL1-L4-Fc, the second polypeptide has a structure represented by VL3, and the third polypeptide has a structure represented by VH3-Fc. In some aspects, the first polypeptide has a structure represented by VH1-L1-VH2-L2-VL2-L3-VL1-L4-Fc, the second polypeptide has a structure represented by VL3-L1, and the third polypeptide has a structure represented by VH3-Fc. In some aspects, the first polypeptide has a structure represented by VH1-L1-VH2-L2-VL2-L3-VL1-L4-Fc, the second polypeptide has a structure represented by VL3, and the third polypeptide has a structure represented by VH3-L1-Fc. In some aspects, the first polypeptide has a structure represented by VH1-L1-VH2-L2-VL2-L3-VL1-L4-Fc, the second polypeptide has a structure represented by VL3-L1, and the third polypeptide has a structure represented by VH3-L1-Fc. The VL1, VL2, VL3, VH1, VH2, and/or VH3 may specifically bind to A2AR, APRIL, ATPDase, BAFF, BAFFR, BCMA, BlyS, BTK, BTLA, B7DC, B7H1, B7H2, B7H3, B7H4, B7H5, B7H6, B7H7, B7RP1, B7-4, C3, C5, CCL2, CCL3, CCL4, CCL5, CCL7, CCL8, CCL11, CCL15, CCL17, CCL19, CCL20, CCL21, CCL25 CCR3, CCR4, CD3, CD19, CD20, CD24, CD27, CD28, CD38, CD39, CD40, CD40L, CD47, CD52, CD70, CD80, CD86, CD123, CD133, CD137, CD137L, CD160, CD272, CEACAM5, CLEC9, CLEC91, CRTH2, CSF-1, CSF-2, CSF-3, CXCL1, CXCL2, CXCL4, CXCL12, CXCL13, CXCR3, cMet, CTLA4, DLL3, DNGR-1, E-cadherin, EGFR, ENTPD1, EpCAM, FCER1, FCER1A, FCER2, FGFR, FLAP, FOLH1, Gi24, GITR, GITRL, GPR5, HER2, HER3, ICOSL, ICOS, HHLA2, HMGB1, HVEM, IDO, IFNa, IgE, IGF1R, I2Rbeta, IL1, IL1A, IL1B, IL1F10, IL2, IL4, IL4Ra, I5, IL5R, IL6, IL7, IL7Ra, IL8, IL9, IL9R, IL10, rhIL10, IL12, IL13, IL13Ra1, IL13Ra2, 1L15, IL17, IL17Rb, IL18, IL22, IL23, IL25, IL7, IL33, IL35, ITGB4, ITK, KIR, LAG3, LAMP1, leptin, LPFS2, MHC class II, MUC-1, MUC-16, NCR3LG1, NKG2D, NKp46, NTPDase-1, OX40, OX40L, PD-1, PD-L1, PD-L2, PROM1, S152, SIRPalpha, SISP1, SLC, SPG64, ST2, STEAP1, STEAP2, Syk kinase, STEAP1, TROP2, TACI, TDO, T14, TIGIT, TIM3, TLR, TLR2, TLR4, TLR5, TLR9, TMEF1, TNFa, TNFRSF7, Tp55, TREM1, TSLP, TSLPR, TWEAK, VEGF, VISTA, Vstm3, WUCAM, DLL4, TGFbeta, GP100, GPRC5D, CD30 or CD16A. For the avoidance of doubt, all the antigen binding polypeptide complex structures described herein can be combined with any one or more of the targets described herein. Any and all disclosure herein in relation to targets for antigen binding polypeptides of the invention is generally applicable, and applies equally and without reservation to each and every antigen binding polypeptide and antigen binding polypeptide complex described herein. For the avoidance of doubt, the VL1, VL2, VL3, VH1, VH2, and/or VH3 of each and every antigen binding polypeptide and antigen binding polypeptide complex described herein may independently bind to any one of said particularly preferred targets.

[0177] In other aspects, the invention is directed to an antigen binding polypeptide complex comprising a first polypeptide, a second polypeptide, and a third polypeptide; wherein the first polypeptide has a structure represented by VL1-VL2-VH2-VH1-CH1; VH1-VH2-VL2-VL1-CH1; VL1-VL2-VH2-VH1-CL; VH1-VH2-VL2-VL1-CL; VL1-VL2-VH2-VH1-CH1-CL; VH1-VH2-VL2-VL1-CH1-CL; VL1-VL2-VH2-VH1-CL-CH1; VH1-VH2-VL2-VL1-CL-CH1; VL1-L1-VL2-L2-VH2-L3-VH1-L4-CH1; VH1-L1-VH2-L2-VL2-L3-VL1-L4-CH1; VL1-L1-VL2-L2-VH2-L3-VH1-L4-CL; VH1-L1-VH2-L2-VL2-L3-VL1-L4-CL; VL1-L1-VL2-L2-VH2-L3-VH1-L4-CH1-L5-CL; VH1-L1-VH2-L2-VL2-L3-VL1-L4-CH1-L5-CL; VL1-L1-VL2-L2-VH2-L3-VH1-L4-CL-L5-CH1; or VH1-L1-VH2-L2-VL2-L3-VL1-L4-CL-L5-CH1; wherein the second polypeptide has a structure represented by VL3-CH1; VL3-CL; VL3-L1-CH1; or VL3-L1-CL; wherein the third polypeptide has a structure represented by VH3-CH1; VH3-CL; VH3-L1-CH1; or VH3-L1-CL; wherein VL1 is a first immunoglobulin light chain variable region that specifically binds to A2AR, APRIL, ATPDase, BAFF, BAFFR, BCMA, BlyS, BTK, BTLA, B7DC, B17H1, B17H2, B17H3, B17H4, B17H5, B17H6, B17H7, B7RP1, B7-4, C3, C5, CCL2, CCL3, CCL4, CCLS, CCL7, CCL8, CCLI1, CCL15, CCL17, CCL19, CCL20, CCL21, CCL25 CCR3, CCR4, CD3, CD19, CD20, CD24, CD27, CD28, CD38, CD39, CD40, CD40L, CD47, CD52, CD70, CD80, CD86, CD123, CD133, CD137, CD137L, CD160, CD272, CEACAM5, CLEC9, CLEC91, CRTH2, CSF-1, CSF-2, CSF-3, CXCL1, CXCL2, CXCL4, CXCL12, CXCL13, CXCR3, cMet, CTLA4, DLL3, DNGR-1, E-cadherin, EGFR, ENTPD1, EpCAM, FCER1, FCER1A, FCER2, FGFR, FLAP, FOLH1, Gi24, GITR, GITRL, GPR5, HER2, HER3, ICOSL, ICOS, HHLA2, HMGB1, HVEM, IDO, IFNa, IgE, IGF1R, IL2Rbeta, IL1, IL1A, IL1B, IL1F10, IL2, IL4, IL4Ra, IL5, IL5R, IL6, IL7, IL7Ra, IL8, IL9, IL9R, IL10, rhIL10, IL12, IL13, IL13Ra1, IL13Ra2, IL15, IL17, IL17Rb, L18, IL22, IL23, IL25, IL7, IL33, IL35, ITGB4, ITK, KIR, LAG3, LAMP1, leptin, LPFS2, MHC class II, MUC-1, MUC-16, NCR3LG1, NKG2D, NKp46, NTPDase-1, OX40, OX40L, PD-1, PD-L1, PD-L2, PROM1, S152, SIRPalpha, SISP1, SLC, SPG64, ST2, STEAP1, STEAP2, Syk kinase, STEAP1, TROP2, TACI, TDO, T14, TIGIT, TIM3, TLR, TLR2, TLR4, TLR5, TLR9, TMEF1, TNFa, TNFRSF7, Tp55, TREM1, TSLP, TSLPR, TWEAK, VEGF, VISTA, Vstm3, WUCAM, DLL4, TGFbeta, GP100, GPRC5D, CD30 or CD16A; VL2 is a second immunoglobulin light chain variable region that specifically binds to A2AR, APRIL, ATPDase, BAFF, BAFFR, BCMA, BlyS, BTK, BTLA, B7DC, B7H1, B7H2, B7H3, B7H4, B7H5, B7H6, B7H7, B7RP1, B7-4, C3, C5, CCL2, CCL3, CCL4, CCL5, CCL7, CCL8, CCL11, CCL15, CCL17, CCL19, CCL20, CCL21, CCL25 CCR3, CCR4, CD3, CD19, CD20, CD24, CD27, CD28, CD38, CD39, CD40, CD40L, CD47, CD52, CD70, CD80, CD86, CD123, CD133, CD137, CD137L, CD160, CD272, CEACAM5, CLEC9, CLEC91, CRTH2, CSF-1, CSF-2, CSF-3, CXCL1, CXCL2, CXCL4, CXCL12, CXCL13, CXCR3, cMet, CTLA4, DLL3, DNGR-1, E-cadherin, EGFR, ENTPD1, EpCAM, FCER1, FCER1A, FCER2, FGFR, FLAP, FOLH1, Gi24, GITR, GITRL, GPR5, HER2, HER3, ICOSL, ICOS, HHLA2, HMGB1, HVEM, IDO, IFNa, IgE, IGF1R, IL2Rbeta, IL1, IL1A, IL1B, ILF10, IL2, IL4, IL4Ra, IL5, IL5R, IL6, IL7, IL7Ra, IL8, IL9, IL9R, IL10, rhIL10, 1L12, IL13, IL13Ra1, IL13Ra2, IL15, IL17, IL17Rb, IL18, IL22, IL23, IL25, IL7, IL33, IL35, ITGB4, ITK, KIR, LAG3, LAMP1, leptin, LPFS2, MHC class II, MUC-1, MUC-16, NCR3LG1, NKG2D, NKp46, NTPDase-1, OX40, OX40L, PD-1, PD-L1, PD-L2, PROM1, S152, SIRPalpha, SISP1, SLC, SPG64, ST2, STEAP1, STEAP2, Syk kinase, STEAP1, TROP2, TACI, TDO, T14, TIGIT, TIM3, TLR, TLR2, TLR4, TLR5, TLR9, TMEF1, TNFa, TNFRSF7, Tp55, TREM1, TSLP, TSLPR, TWEAK, VEGF, VISTA, Vstm3, WUCAM, DLL4, TGFbeta, GP100, GPRC5D, CD30 or CD16A; VL3 is a third immunoglobulin light chain variable region that specifically binds to A2AR, APRIL, ATPDase, BAFF, BAFFR, BCMA, BlyS, BTK, BTLA, B7DC, B7H1, B7H2, B7H3, B7H4, B7H5, B7H6, B7H7, B7RP1, B7-4, C3, C5, CCL2, CCL3, CCL4, CCL5, CCL7, CCL8, CCL11, CCL15, CCL17, CCL19, CCL20, CCL21, CCL25 CCR3, CCR4, CD3, CD19, CD20, CD24, CD27, CD28, CD38, CD39, CD40, CD40L, CD47, CD52, CD70, CD80, CD86, CD123, CD133, CD137, CD137L, CD160, CD272, CEACAM5, CLEC9, CLEC91, CRTH2, CSF-1, CSF-2, CSF-3, CXCL1, CXCL2, CXCL4, CXCL12, CXCL13, CXCR3, cMet, CTLA4, DLL3, DNGR-1, E-cadherin, EGFR, ENTPD1, EpCAM, FCER1, FCER1A, FCER2, FGFR, FLAP, FOLH1, Gi24, GITR, GITRL, GPR5, HER2, HER3, ICOSL, ICOS, HHLA2, HMGB1, HVEM, IDO, IFNa, IgE, IGF1R, IL2Rbeta, IL1, IL1A, IL1B, IL1F10, IL2, IL4, IL4Ra, IL5, IL5R, IL6, IL7, IL7Ra, IL8, IL9, IL9R, IL10, rhIL10, IL12, IL13, IL13Ra1, IL13Ra2, IL15, IL17, IL17Rh, IL18, IL22, IL23, IL25, IL7, IL33, IL35, ITGB4, ITK, KIR, LAG3, LAMP1, leptin, LPFS2, MHC class II, MUC-1, MUC-16, NCR3LG1, NKG2D, NKp46, NTPDase-1, OX40, OX40L, PD-1, PD-L1, PD-L2, PROM1, S1S2, SIRPalpha, SISP1, SLC, SPG64, ST2, STEAP1, STEAP2, Syk kinase, STEAP1, TROP2, TACI, TDO, T14, TIGIT, TIM3, TLR, TLR2, TLR4, TLR5, TLR9, TMEF1, TNFa, TNFRSF7, Tp55, TREM1, TSLP, TSLPR, TWEAK, VEGF, VISTA, Vstm3, WUCAM, DLL4, TGFbeta, GP100, GPRC5D, CD30 or CD16A; VH1 is a first immunoglobulin heavy chain variable region that specifically binds to A2AR, APRIL, ATPDase, BAFF, BAFFR, BCMA, BlyS, BTK, BTLA, B7DC, B7H1, B7H2, B7H3, B7H4, B7H5, B7H6, B7H7, B7RP1, B7-4, C3, C5, CCL2, CCL3, CCL4, CCL5, CCL7, CCL8, CCL11, CCL15, CCL17, CCL19, CCL20, CCL21, CCL25 CCR3, CCR4, CD3, CD19, CD20, CD24, CD27, CD28, CD38, CD39, CD40, CD40L, CD47, CD52, CD70, CD80, CD86, CD123, CD133, CD137, CD137L, CD160, CD272, CEACAM5, CLEC9, CLEC91, CRTH2, CSF-1, CSF-2, CSF-3, CXCL1, CXCL2, CXCL4, CXCL12, CXCL13, CXCR3, cMet, CTLA4, DLL3, DNGR-1, E-cadherin, EGFR, ENTPD1, EpCAM, FCER1, FCER1A, FCER2, FGFR, FLAP, FOLH1, Gi24, GITR, GITRL, GPR5, HER2, HER3, ICOSL, ICOS, HHLA2, HMGB1, HVEM, IDO, IFNa, IgE, IGF1R, IL2Rbeta, IL1, IL1A, IL1B, IL1F10, IL2, IL4, IL4Ra, IL5, IL5R, IL6, IL7, IL7Ra, IL8, IL9, IL9R, IL10, rhIL10, IL12, IL13, R13Ra1, IL13Ra2, IL15, IL17, IL17Rb, IL18, IL22, IL23, IL25, IL7, IL33, IL35, ITGB4, ITK, KIR, LAG3, LAMP1, leptin, LPFS2, MHC class II, MUC-1, MUC-16, NCR3LG1, NKG2D, NKp46, NTPDase-1, OX40, OX40L, PD-1, PD-L1, PD-L2, PROM1, S152, SIRPalpha, SISP1, SLC, SPG64, ST2, STEAP1, STEAP2, Syk kinase, STEAP1, TROP2, TACI, TDO, T14, TIGIT, TIM3, TLR, TLR2, TLR4, TLR5, TLR9, TMEF1, TNFa, TNFRSF7, Tp55, TREM1, TSLP, TSLPR, TWEAK, VEGF, VISTA, Vstm3, WUCAM, DLL4, TGFbeta, GP100, GPRC5D, CD30 or CD16A; VH2 is a second immunoglobulin heavy chain variable region that specifically binds to A2AR, APRIL, ATPDase, BAFF, BAFFR, BCMA, BlyS, BTK, BTLA, B7DC, B7H1, B7H2, B7H3, B7H4, B7H5, B7H6, B7H7, B7RP1, B7-4, C3, C5, CCL2, CCL3, CCL4, CCL5, CCL7, CCL8, CCL11, CCL15, CCL17, CCL19, CCL20, CCL21, CCL25 CCR3, CCR4, CD3, CD19, CD20, CD24, CD27, CD28, CD38, CD39, CD40, CD40L, CD47, CD52, CD70, CD80, CD86, CD123, CD133, CD137, CD137L, CD160, CD272, CEACAM5, CLEC9, CLEC91, CRTH2, CSF-1, CSF-2, CSF-3, CXCL1, CXCL2, CXCL4, CXCL12, CXCL13, CXCR3, cMet, CTLA4, DLL3, DNGR-1, E-cadherin, EGFR, ENTPD1, EpCAM, FCER1, FCER1A, FCER2, FGFR, FLAP, FOLH1, Gi24, GITR, GITRL, GPR5, HER2, HER3, ICOSL, ICOS, HHLA2, HMGB1, HVEM, IDO, IFNa, IgE, IGF1R, IL2Rbeta, IL1, IL1A, IL1B, IL1F10, IL2, IL4, IL4Ra, IL5, IL5R, IL6, IL7, IL7Ra, IL8, IL9, IL9R, IL10, rhIL10, IL12, IL13, IL13Ra1, IL13Ra2, IL15, IL17, IL17Rb, IL18, IL22, IL23, IL25, IL7, IL33, IL35, ITGB4, ITK, KIR, LAG3, LAMP1, leptin, LPFS2, MHC class II, MUC-1, MUC-16, NCR3LG1, NKG2D, NKp46, NTPDase-1, OX40, OX40L, PD-1, PD-L1, PD-L2, PROM1, S152, SIRPalpha, SISP1, SLC, SPG64, ST2, STEAP1, STEAP2, Syk kinase, STEAP1, TROP2, TACI, TDO, T14, TIGIT, TIM3, TLR, TLR2, TLR4, TLR5, TLR9, TMEF1, TNFa, TNFRSF7, Tp55, TREM1, TSLP, TSLPR, TWEAK, VEGF, VISTA, Vstm3, WUCAM, DLL4, TGFbeta, GP100, GPRC5D, CD30 or CD16A; VH3 is a third immunoglobulin heavy chain variable region that specifically binds to A2AR, APRIL, ATPDase, BAFF, BAFFR, BCMA, BlyS, BTK, BTLA, B7DC, B7H1, B7H2, B7H3, B7H4, B7H5, B7H6, B7H7, B7RP1, B7-4, C3, C5, CCL2, CCL3, CCL4, CCL5, CCL7, CCL8, CCL11, CCL15, CCL17, CCL19, CCL20, CCL21, CCL25 CCR3, CCR4, CD3, CD19, CD20, CD24, CD27, CD28, CD38, CD39, CD40, CD40L, CD47, CD52, CD70, CD80, CD86, CD123, CD133, CD137, CD137L, CD160, CD272, CEACAM5, CLEC9, CLEC91, CRTH2, CSF-1, CSF-2, CSF-3, CXCL1, CXCL2, CXCL4, CXCL12, CXCL13, CXCR3, cMet, CTLA4, DLL3, DNGR-1, E-cadherin, EGFR, ENTPD1, EpCAM, FCER1, FCER1A, FCER2, FGFR, FLAP, FOLH1, Gi24, GITR, GITRL, GPR5, HER2, HER3, ICOSL, ICOS, HHLA2, HMGB1, HVEM, IDO, IFNa, IgE, IGF1R, IL2Rbeta, IL1, IL1A, IL1B, IL1F10, IL2, IL4, IL4Ra, IL5, IL5R, IL6, IL7, IL7Ra, IL8, IL9, IL9R, IL10, rhIL10, IL12, IL13, R13Ra1, IL13Ra2, IL15, IL17, IL17Rb, IL18, IL22, IL23, IL25, IL7, IL33, IL35, ITGB4, ITK, KIR, LAG3, LAMP1, leptin, LPFS2, MHC class II, MUC-1, MUC-16, NCR3LG1, NKG2D, NKp46, NTPDase-1, OX40, OX40L, PD-1, PD-L1, PD-L2, PROM1, S152, SIRPalpha, SISP1, SLC, SPG64, ST2, STEAP1, STEAP2, Syk kinase, STEAP1, TROP2, TACI, TDO, T14, TIGIT, TIM3, TLR, TLR2, TLR4, TLR5, TLR9, TMEF1, TNFa, TNFRSF7, Tp55, TREM1, TSLP, TSLPR, TWEAK, VEGF, VISTA, Vstm3, WUCAM, DLL4, TGFbeta, GP100, GPRC5D, CD30 or CD16A; CH1 is an immunoglobulin heavy chain constant region 1; CL is an immunoglobulin light chain constant region; and L1, L2, L3, L4 and L5 are amino acid linkers. In some aspects, the first polypeptide has a structure represented by VL1-VL2-VH2-VH1-CH1; VH1-VH2-VL2-VL1-CH1; VL1-VL2-VH2-VH1-CL; VH1-VH2-VL2-VL1-CL; VL1-VL2-VH2-VH1-CH1-CL; VH1-VH2-VL2-VL1-CH1-CL; VL1-VL2-VH2-VH1-CL-CH1; VH1-VH2-VL2-VL1-CL-CH1; VL1-L1-VL2-L2-VH2-L3-VH1-L4-CH1; VH1-L1-VH2-L2-VL2-L3-VL1-L4-CH1; VL1-L1-VL2-L2-VH2-L3-VH1-L4-CL; VH1-L1-VH2-L2-VL2-L3-VL1-L4-CL; VL1-L1-VL2-L2-VH2-L3-VH1-L4-CH1-L5-CL; VH1-L1-VH2-L2-VL2-L3-VL1-L4-CH1-L5-CL; VL1-L1-VL2-L2-VH2-L3-VH1-L4-CL-L5-CH1; or VH1-L1-VH2-L2-VL2-L3-VL1-L4-CL-L5-CH1, the second polypeptide has a structure represented by VL3-CH1, and the third polypeptide has a structure represented by VH3-CH1. In some aspects, the first polypeptide has a structure represented by VL1-VL2-VH2-VH1-CH1; VH1-VH2-VL2-VL1-CH1; VL1-VL2-VH2-VH1-CL; VH1-VH2-VL2-VL1-CL; VL1-VL2-VH2-VH1-CH1-CL; VH1-VH2-VL2-VL1-CH1-CL; VL1-VL2-VH2-VH1-CL-CH1; VH1-VH2-VL2-VL1-CL-CH1; VL1-L1-VL2-L2-VH2-L3-VH1-L4-CH1; VH1-L1-VH2-L2-VL2-L3-VL1-L4-CH1; VL1-L1-VL2-L2-VH2-L3-VH1-L4-CL; VH1-L1-VH2-L2-VL2-L3-VL1-L4-CL; VL1-L1-VL2-L2-VH2-L3-VH1-L4-CH1-L5-CL; VH1-L1-VH2-L2-VL2-L3-VL1-L4-CH1-L5-CL; VL1-L1-VL2-L2-VH2-L3-VH1-L4-CL-L5-CH1; or VH1-L1-VH2-L2-VL2-L3-VL1-L4-CL-L5-CH1, the second polypeptide has a structure represented by VL3-CH1, and the third polypeptide has a structure represented by VH3-CL. In some aspects, the first polypeptide has a structure represented by VL1-VL2-VH2-VH1-CH1; VH1-VH2-VL2-VL1-CH1; VL1-VL2-VH2-VH-CL; VH1-VH2-VL2-VL1-CL; VL1-VL2-VH2-VH1-CH1-CL; VH1-VH2-VL2-VL1-CH1-CL; VL1-VL2-VH2-VH1-CL-CH1; VH1-VH2-VL2-VL1-CL-CH1; VL1-L1-VL2-L2-VH2-L3-VH1-L4-CH1; VH1-L1-VH2-L2-VL2-L3-VL1-L4-CH1; VL1-L1-VL2-L2-VH2-L3-VH1-L4-CL; VH1-L1-VH2-L2-VL2-L3-VL1-L4-CL; VL1-L1-VL2-L2-VH2-L3-VH-L4-CH-L5-CL; VH1-L1-VH2-L2-VL2-L3-VL1-L4-CH1-L5-CL; VL1-L1-VL2-L2-VH2-L3-VH1-L4-CL-L5-CH1; or VH1-L1-VH2-L2-VL2-L3-VL1-L4-CL-L5-CH1, the second polypeptide has a structure represented by VL3-CH1, and the third polypeptide has a structure represented by VH3-L1-CH1. In some aspects, the first polypeptide has a structure represented by VL1-VL2-VH2-VH1-CH1; VH1-VH2-VL2-VL1-CH1; VL1-VL2-VH2-VH1-CL; VH1-VH2-VL2-VL1-CL; VL1-VL2-VH2-VH1-CH1-CL; VH1-VH2-VL2-VL1-CH1-CL; VL1-VL2-VH2-VH1-CL-CH1; VH1-VH2-VL2-VL1-CL-CH1; VL1-L1-VL2-L2-VH2-L3-VH1-L4-CH1; VH1-L1-VH2-L2-VL2-L3-VL1-L4-CH1; VL1-L1-VL2-L2-VH2-L3-VH1-L4-CL; VH1-L1-VH2-L2-VL2-L3-VL1-L4-CL; VL1-L1-VL2-L2-VH2-L3-VH-L4-CH-L5-CL; VH1-L1-VH2-L2-VL2-L3-VL1-L4-CH1-L5-CL; VL1-L1-VL2-L2-VH2-L3-VH-L4-CL-L5-CH1; or VH1-L1-VH2-L2-VL2-L3-VL1-L4-CL-L5-CH1, the second polypeptide has a structure represented by VL3-CH1, and the third polypeptide has a structure represented by VH3-L1-CL. In some aspects, the first polypeptide has a structure represented by VL1-VL2-VH2-VH1-CH1; VH1-VH2-VL2-VL1-CH1; VL1-VL2-VH2-VH1-CL; VH1-VH2-VL2-VL1-CL; VL1-VL2-VH2-VH-CH1-CL; VH-VH2-VL2-VL1-CH1-CL; VL1-VL2-VH2-VH1-CL-CH1; VH1-VH2-VL2-VL1-CL-CH1; VL1-L1-VL2-L2-VH2-L3-VH1-L4-CH1; VH1-L1-VH2-L2-VL2-L3-VL1-L4-CH1; VL1-L1-VL2-L2-VH2-L3-VH-L4-CL; VH1-L1-VH2-L2-VL2-L3-VL1-L4-CL; VL1-L1-VL2-L2-VH2-L3-VH1-L4-CH1-L5-CL; VH1-L1-VH2-L2-VL2-L3-VL1-L4-CH1-L5-CL; VL1-L1-VL2-L2-VH2-L3-VH1-L4-CL-L5-CH1; or VH1-L1-VH2-L2-VL2-L3-VL1-L4-CL-L5-CH1, the second polypeptide has a structure represented by VL3-CL, and the third polypeptide has a structure represented by VH3-CH1. In some aspects, the first polypeptide has a structure represented by VL1-VL2-VH2-VH1-CH1; VH1-VH2-VL2-VL1-CH1; VL1-VL2-VH2-VH1-CL; VH-VH2-VL2-VL1-CL; VL1-VL2-VH2-VH1-CH1-CL; VH1-VH2-VL2-VL1-CH1-CL; VL1-VL2-VH2-VH1-CL-CH1; VH1-VH2-VL2-VL1-CL-CH1; VL1-L1-VL2-L2-VH2-L3-VH1-L4-CH1; VH1-L1-VH2-L2-VL2-L3-VL1-L4-CH1; VL1-L1-VL2-L2-VH2-L3-VH1-L4-CL; VH1-L1-VH2-L2-VL2-L3-VL1-L4-CL; VL1-L1-VL2-L2-VH2-L3-VH1-L4-CH1-L5-CL; VH1-L1-VH2-L2-VL2-L3-VL1-L4-CH1-L5-CL; VL1-L1-VL2-L2-VH2-L3-VH1-L4-CL-L5-CH1; or VH1-L1-VH2-L2-VL2-L3-VL1-L4-CL-L5-CH1, the second polypeptide has a structure represented by VL3-CL, and the third polypeptide has a structure represented by VH3-CL. In some aspects, the first polypeptide has a structure represented by VL1-VL2-VH2-VH1-CH1; VH1-VH2-VL2-VL1-CH1; VL1-VL2-VH2-VH1-CL; VH1-VH2-VL2-VL1-CL; VL1-VL2-VH2-VH1-CH1-CL; VH1-VH2-VL2-VL1-CH1-CL; VL1-VL2-VH2-VH1-CL-CH1; VH1-VH2-VL2-VL1-CL-CH1; VL1-L1-VL2-L2-VH2-L3-VH1-L4-CH1; VH1-L1-VH2-L2-VL2-L3-VL1-L4-CH1; VL1-L1-VL2-L2-VH2-L3-VH1-L4-CL; VH1-L1-VH2-L2-VL2-L3-VL1-L4-CL; VL1-L1-VL2-L2-VH2-L3-VH1-L4-CH1-L5-CL; VH1-L1-VH2-L2-VL2-L3-VL1-L4-CH1-L5-CL; VL1-L1-VL2-L2-VH2-L3-VH1-L4-CL-L5-CH1; or VH1-L1-VH2-L2-VL2-L3-VL1-L4-CL-L5-CH1, the second polypeptide has a structure represented by VL3-CL, and the third polypeptide has a structure represented by VH3-L1-CH1. In some aspects, the first polypeptide has a structure represented by VL1-VL2-VH2-VH1-CH1; VH1-VH2-VL2-VL1-CH1; VL1-VL2-VH2-VH1-CL; VH1-VH2-VL2-VL1-CL; VL1-VL2-VH2-VH1-CH1-CL; VH1-VH2-VL2-VL1-CH1-CL; VL1-VL2-VH2-VH1-CL-CH1; VH1-VH2-VL2-VL1-CL-CH1; VL1-L1-VL2-L2-VH2-L3-VH1-L4-CH1; VH1-L1-VH2-L2-VL2-L3-VL1-L4-CH1; VL1-L1-VL2-L2-VH2-L3-VH1-L4-CL; VH1-L1-VH2-L2-VL2-L3-VL1-L4-CL; VL1-L1-VL2-L2-VH2-L3-VH1-L4-CH1-L5-CL; VH1-L1-VH2-L2-VL2-L3-VL1-L4-CH1-L5-CL; VL1-L1-VL2-L2-VH2-L3-VH1-L4-CL-L5-CH1; or VH1-L1-VH2-L2-VL2-L3-VL1-L4-CL-L5-CH1, the second polypeptide has a structure represented by VL3-CL, and the third polypeptide has a structure represented by VH3-L1-CL. In some aspects, the first polypeptide has a structure represented by VL1-VL2-VH2-VH1-CH1; VH1-VH2-VL2-VL1-CH1; VL1-VL2-VH2-VH1-CL; VH1-VH2-VL2-VL1-CL; VL1-VL2-VH2-VH1-CH1-CL; VH1-VH2-VL2-VL1-CH1-CL; VL1-VL2-VH2-VH1-CL-CH1; VH1-VH2-VL2-VL1-CL-CH1; VL1-L1-VL2-L2-VH2-L3-VH1-L4-CH1; VH1-L1-VH2-L2-VL2-L3-VL1-L4-CH1; VL1-L1-VL2-L2-VH2-L3-VH1-L4-CL; VH1-L1-VH2-L2-VL2-L3-VL1-L4-CL; VL1-L1-VL2-L2-VH2-L3-VH1-L4-CH1-L5-CL; VH1-L1-VH2-L2-VL2-L3-VL1-L4-CH1-L5-CL; VL1-L1-VL2-L2-VH2-L3-VH1-L4-CL-L5-CH1; or VH1-L1-VH2-L2-VL2-L3-VL1-L4-CL-L5-CH1, the second polypeptide has a structure represented by VL3-L1-CH1, and the third polypeptide has a structure represented by VH3-CH1. In some aspects, the first polypeptide has a structure represented by VL1-VL2-VH2-VH1-CH1; VH1-VH2-VL2-VL1-CH1; VL1-VL2-VH2-VH1-CL; VH1-VH2-VL2-VL1-CL; VL1-VL2-VH2-VH1-CH1-CL; VH1-VH2-VL2-VL1-CH1-CL; VL1-VL2-VH2-VH1-CL-CH1; VH1-VH2-VL2-VL1-CL-CH1; VL1-L1-VL2-L2-VH2-L3-VH1-L4-CH1; VH1-L1-VH2-L2-VL2-L3-VL1-L4-CH1; VL1-L1-VL2-L2-VH2-L3-VH1-L4-CL; VH1-L1-VH2-L2-VL2-L3-VL1-L4-CL; VL1-L1-VL2-L2-VH2-L3-VH1-L4-CH1-L5-CL; VH1-L1-VH2-L2-VL2-L3-VL1-L4-CH1-L5-CL; VL1-L1-VL2-L2-VH2-L3-VH1-L4-CL-L5-CH1; or VH1-L1-VH2-L2-VL2-L3-VL1-L4-CL-L5-CH1, the second polypeptide has a structure represented by VL3-L1-CH1, and the third polypeptide has a structure represented by VH3-CL. In some aspects, the first polypeptide has a structure represented by VL1-VL2-VH2-VH1-CH1; VH1-VH2-VL2-VL1-CH1; VL1-VL2-VH2-VH1-CL; VH1-VH2-VL2-VL1-CL; VL1-VL2-VH2-VH1-CH1-CL; VH1-VH2-VL2-VL1-CH1-CL; VL1-VL2-VH2-VH1-CL-CH1; VH1-VH2-VL2-VL1-CL-CH1; VL1-L1-VL2-L2-VH2-L3-VH1-L4-CH1; VH1-L1-VH2-L2-VL2-L3-VL1-L4-CH1; VL1-L1-VL2-L2-VH2-L3-VH1-L4-CL; VH1-L1-VH2-L2-VL2-L3-VL1-L4-CL; VL1-L1-VL2-L2-VH2-L3-VH1-L4-CH1-L5-CL; VH1-L1-VH2-L2-VL2-L3-VL1-L4-CH1-L5-CL; VL1-L1-VL2-L2-VH2-L3-VH1-L4-CL-L5-CH1; or VH1-L1-VH2-L2-VL2-L3-VL1-L4-CL-L5-CH1, the second polypeptide has a structure represented by VL3-L1-CH1, and the third polypeptide has a structure represented by VH3-L1-CH1. In some aspects, the first polypeptide has a structure represented by VL1-VL2-VH2-VH1-CH1; VH1-VH2-VL2-VL1-CH1; VL1-VL2-VH2-VH1-CL; VH1-VH2-VL2-VL1-CL; VL1-VL2-VH2-VH1-CH1-CL; VH1-VH2-VL2-VL1-CH1-CL; VL1-VL2-VH2-VH1-CL-CH1; VH1-VH2-VL2-VL1-CL-CH1; VL1-L1-VL2-L2-VH2-L3-VH1-L4-CH1; VH1-L1-VH2-L2-VL2-L3-VL1-L4-CH1; VL1-L1-VL2-L2-VH2-L3-VH1-L4-CL; VH1-L1-VH2-L2-VL2-L3-VL1-L4-CL; VL1-L1-VL2-L2-VH2-L3-VH1-L4-CH1-L5-CL; VH1-L1-VH2-L2-VL2-L3-VL1-L4-CH1-L5-CL; VL1-L1-VL2-L2-VH2-L3-VH1-L4-CL-L5-CH1; or VH1-L1-VH2-L2-VL2-L3-VL1-L4-CL-L5-CH1, the second polypeptide has a structure represented by VL3-L1-CH1, and the third polypeptide has a structure represented by VH3-L1-CL. In some aspects, the first polypeptide has a structure represented by VL1-VL2-VH2-VH1-CH1; VH1-VH2-VL2-VL1-CH1; VL1-VL2-VH2-VH1-CL; VH1-VH2-VL2-VL1-CL; VL1-VL2-VH2-VH1-CH1-CL; VH1-VH2-VL2-VL1-CH1-CL; VL1-VL2-VH2-VH1-CL-CH1; VH1-VH2-VL2-VL1-CL-CH1; VL1-L1-VL2-L2-VH2-L3-VH1-L4-CH1; VH1-L1-VH2-L2-VL2-L3-VL1-L4-CH1; VL1-L1-VL2-L2-VH2-L3-VH1-L4-CL; VH1-L1-VH2-L2-VL2-L3-VL1-L4-CL; VL1-L1-VL2-L2-VH2-L3-VH1-L4-CH1-L5-CL; VH1-L1-VH2-L2-VL2-L3-VL1-L4-CH1-L5-CL; VL1-L1-VL2-L2-VH2-L3-VH1-L4-CL-L5-CH1; or VH1-L1-VH2-L2-VL2-L3-VL1-L4-CL-L5-CH1, the second polypeptide has a structure represented by VL3-L1-CL, and the third polypeptide has a structure represented by VH3-CH1. In some aspects, the first polypeptide has a structure represented by VL1-VL2-VH2-VH1-CH1; VH1-VH2-VL2-VL1-CH1; VL1-VL2-VH2-VH1-CL; VH1-VH2-VL2-VL1-CL; VL1-VL2-VH2-VH1-CH1-CL; VH1-VH2-VL2-VL1-CH1-CL; VL1-VL2-VH2-VH1-CL-CH1; VH1-VH2-VL2-VL1-CL-CH1; VL1-L1-VL2-L2-VH2-L3-VH1-L4-CH1; VH1-L1-VH2-L2-VL2-L3-VL1-L4-CH1; VL1-L1-VL2-L2-VH2-L3-VH1-L4-CL; VH1-L1-VH2-L2-VL2-L3-VL1-L4-CL; VL1-L1-VL2-L2-VH2-L3-VH1-L4-CH1-L5-CL; VH1-L1-VH2-L2-VL2-L3-VL1-L4-CH1-L5-CL; VL1-L1-VL2-L2-VH2-L3-VH1-L4-CL-L5-CH1; or VH1-L1-VH2-L2-VL2-L3-VL1-L4-CL-L5-CH1, the second polypeptide has a structure represented by VL3-L1-CL, and the third polypeptide has a structure represented by VH3-CL. In some aspects, the first polypeptide has a structure represented by VL1-VL2-VH2-VH1-CH1; VH1-VH2-VL2-VL1-CH1; VL1-VL2-VH2-VH1-CL; VH1-VH2-VL2-VL1-CL; VL1-VL2-VH2-VH1-CH1-CL; VH1-VH2-VL2-VL1-CH1-CL; VL1-VL2-VH2-VH1-CL-CH1; VH1-VH2-VL2-VL1-CL-CH1; VL1-L1-VL2-L2-VH2-L3-VH1-L4-CH1; VH1-L1-VH2-L2-VL2-L3-VL1-L4-CH1; VL1-L1-VL2-L2-VH2-L3-VH1-L4-CL; VH1-L1-VH2-L2-VL2-L3-VL1-L4-CL; VL1-L1-VL2-L2-VH2-L3-VH1-L4-CH1-L5-CL; VH1-L1-VH2-L2-VL2-L3-VL1-L4-CH1-L5-CL; VL1-L1-VL2-L2-VH2-L3-VH1-L4-CL-L5-CH1; or VH1-L1-VH2-L2-VL2-L3-VL1-L4-CL-L5-CH1, the second polypeptide has a structure represented by VL3-L1-CL, and the third polypeptide has a structure represented by VH3-L1-CH1. In some aspects, the first polypeptide has a structure represented by VL1-VL2-VH2-VH1-CH1; VH1-VH2-VL2-VL1-CH1; VL1-VL2-VH2-VH1-CL; VH1-VH2-VL2-VL1-CL; VL1-VL2-VH2-VH1-CH1-CL; VH1-VH2-VL2-VL1-CH1-CL; VL1-VL2-VH2-VH1-CL-CH1; VH1-VH2-VL2-VL1-CL-CH1; VL1-L1-VL2-L2-VH2-L3-VH1-L4-CH1; VH1-L1-VH2-L2-VL2-L3-VL1-L4-CH1; VL1-L1-VL2-L2-VH2-L3-VH1-L4-CL; VH1-L1-VH2-L2-VL2-L3-VL1-L4-CL; VL1-L1-VL2-L2-VH2-L3-VH1-L4-CH1-L5-CL; VH1-L1-VH2-L2-VL2-L3-VL1-L4-CH1-L5-CL; VL1-L1-VL2-L2-VH2-L3-VH1-L4-CL-L5-CH1; or VH1-L1-VH2-L2-VL2-L3-VL1-L4-CL-L5-CH1, the second polypeptide has a structure represented by VL3-L1-CL, and the third polypeptide has a structure represented by VH3-L1-CL. The VL1, VL2, VL3, VH1, VH2, and/or VH3 may specifically bind to A2AR, APRIL, ATPDase, BAFF, BAFFR, BCMA, BlyS, BTK, BTLA, B7DC, B7H1, B7H2, B7H3, B7H4, B7H5, B7H6, B7H7, B7RP1, B7-4, C3, C5, CCL2, CCL3, CCL4, CCL5, CCL7, CCL8, CCL11, CCL15, CCL17, CCL19, CCL20, CCL21, CCL25 CCR3, CCR4, CD3, CD19, CD20, CD24, CD27, CD28, CD38, CD39, CD40, CD40L, CD47, CD52, CD70, CD80, CD86, CD123, CD133, CD137, CD137L, CD160, CD272, CEACAM5, CLEC9, CLEC91, CRTH2, CSF-1, CSF-2, CSF-3, CXCL1, CXCL2, CXCL4, CXCL12, CXCL13, CXCR3, cMet, CTLA4, DLL3, DNGR-1, E-cadherin, EGFR, ENTPD1, EpCAM, FCER1, FCER1A, FCER2, FGFR, FLAP, FOLH1, Gi24, GITR, GITRL, GPR5, HER2, HER3, ICOSL, ICOS, HHLA2, HMGB1, HVEM, IDO, IFNa, IgE, IGF1R, IL2Rbeta, IL1, IL1A, IL1B, ILF10, IL2, IL4, IL4Ra, IL5, IL5R, IL6, IL7, IL7Ra, IL8, IL9, IL9R, IL10, rhIL10, IL12, IL13, IL13Ra1, IL13Ra2, IL15, IL17, IL17Rb, IL18, IL22, IL23, IL25, IL7, IL33, IL35, ITGB4, ITK, KIR, LAG3, LAMP1, leptin, LPFS2, MHC class II, MUC-1, MUC-16, NCR3LG1, NKG2D, NKp46, NTPDase-1, OX40, OX40L, PD-1, PD-L1, PD-L2, PROM1, S1S2, SIRPalpha, SISP1, SLC, SPG64, ST2, STEAP1, STEAP2, Syk kinase, STEAP1, TROP2, TACI, TDO, T14, TIGIT, TIM3, TLR, TLR2, TLR4, TLR5, TLR9, TMEF1, TNFa, TNFRSF7, Tp55, TREM1, TSLP, TSLPR, TWEAK, VEGF, VISTA, Vstm3, WUCAM, DLL4, TGFbeta, GP100, GPRC5D, CD30 or CD16A. For the avoidance of doubt, all the antigen binding polypeptide complex structures described herein can be combined with any one or more of the targets described herein. Any and all disclosure herein in relation to targets for antigen binding polypeptides of the invention is generally applicable, and applies equally and without reservation to each and every antigen binding polypeptide and antigen binding polypeptide complex described herein. For the avoidance of doubt, the VL1, VL2, VL3, VH1, VH2, and/or VH3 of each and every antigen binding polypeptide and antigen binding polypeptide complex described herein may independently bind to any one of said particularly preferred targets.

[0178] In other aspects, the invention is directed to an antigen binding polypeptide complex comprising a first polypeptide, a second polypeptide, and a third polypeptide; wherein the first polypeptide has a structure represented by VL1-VL2-VH2-VH1; VH1-VH2-VL2-VL1; VL1-L1-VL2-L2-VH2-L3-VH1; VH1-L1-VH2-L2-VL2-L3-VL1; VL1-VL2-VH2-VH1-Fc; VH1-VH2-VL2-VL1-Fc; VL1-L1-VL2-L2-VH2-L3-VH1-Fc; VH1-L1-VH2-L2-VL2-L3-VL1-Fc; VL1-L1-VL2-L2-VH2-L3-VH1-L4-Fc; VH1-L1-VH2-L2-VL2-L3-VL1-L4-Fc; VL1-VL2-VH2-VH1-CH1; VH1-VH2-VL2-VL1-CH1; VL1-VL2-VH2-VH1-CL; VH1-VH2-VL2-VL1-CL; VL1-VL2-VH2-VH1-CH1-CL; VH1-VH2-VL2-VL1-CH1-CL; VL1-VL2-VH2-VH1-CL-CH1; VH1-VH2-VL2-VL1-CL-CH1; VL1-L1-VL2-L2-VH2-L3-VH1-L4-CH1; VH1-L1-VH2-L2-VL2-L3-VL1-L4-CH1; VL1-L1-VL2-L2-VH2-L3-VH1-L4-CL; VH1-L1-VH2-L2-VL2-L3-VL1-L4-CL; VL1-L1-VL2-L2-VH2-L3-VH1-L4-CH1-L5-CL; VH1-L1-VH2-L2-VL2-L3-VL1-L4-CH1-L5-CL; VL1-L1-VL2-L2-VH2-L3-VH1-L4-CL-L5-CH1; VH1-L1-VH2-L2-VL2-L3-VL1-L4-CL-L5-CH1; VL1-VL2-VH2-VH1-CH1-Fc; VH1-VH2-VL2-VL1-CH1-Fc; VL1-VL2-VH2-VH1-CL-Fc; VH1-VH2-VL2-VL1-CL-Fc; VL1-VL2-VH2-VH1-CH1-CL-Fc; VH1-VH2-VL2-VL1-CH1-CL-Fc; VL1-VL2-VH2-VH1-CL-CH1-Fc; VH1-VH2-VL2-VL1-CL-CH1-Fc; VL1-L1-VL2-L2-VH2-L3-VH1-L4-CH1-Fc; VH1-L1-VH2-L2-VL2-L3-VL1-L4-CH1-Fc; VL1-L1-VL2-L2-VH2-L3-VH1-L4-CL-Fc; VH1-L1-VH2-L2-VL2-L3-VL1-L4-CL-Fc; VL1-L1-VL2-L2-VH2-L3-VH1-L4-CH1-L5-CL-Fc; VH1-L1-VH2-L2-VL2-L3-VL1-L4-CH1-L5-CL-Fc; VL1-L1-VL2-L2-VH2-L3-VH1-L4-CL-L5-CH1-Fc; or VH1-L1-VH2-L2-VL2-L3-VL1-L4-CL-L5-CH1-Fc; wherein the second polypeptide has a structure represented by VL3; VL3-Fc; VL3-CH1; VL3-CL; VL3-CH1-CL; VL3-CL-CH1; VL3-CH1-Fc; VL3-CL-Fc; VL3-CH1-CL-Fc; VL3-CL-CH1-Fc; VL3-L1-Fc; VL3-L1-CH1; VL3-L1-CL; VL3-L1-CH1-L2-CL; VL3-L1-CL-L2-CH1; VL3-L1-CH1-L2-Fc; VL3-L1-CL-L2-Fc; VL3-L1-CH1-L2-CL-Fc; or VL3-L1-CL-L2-CH1-Fc; wherein the third polypeptide has a structure represented by VH3; VH3-Fc; VH3-CH1; VH3-CL; VH3-CH1-CL; VH3-CL-CH1; VH3-CH1-Fc; VH3-CL-Fc; VH3-CH1-CL-Fc; VH3-CL-CH1-Fc; VH3-L1-Fc; VH3-L1-CH1; VH3-L1-CL; VH3-L1-CH1-L2-CL; VH3-L1-CL-L2-CH1; VH3-L1-CH1-L2-Fc; VH3-L1-CL-L2-Fc; VH3-L1-CH1-L2-CL-Fc; or VH3-L1-CL-L2-CH1-Fc; wherein VL1 is a first immunoglobulin light chain variable region that specifically binds to A2AR, APRIL, ATPDase, BAFF, BAFFR, BCMA, BlyS, BTK, BTLA, B7DC, B7H1, B7H2, B7H3, B7H4, B7H5, B7H6, B7H7, B7RP1, B7-4, C3, C5, CCL2, CCL3, CCL4, CCL5, CCL7, CCL8, CCL11, CCL15, CCL17, CCL19, CCL20, CCL21, CCL25 CCR3, CCR4, CD3, CD19, CD20, CD24, CD27, CD28, CD38, CD39, CD40, CD40L, CD47, CD52, CD70, CD80, CD86, CD123, CD133, CD137, CD137L, CD160, CD272, CEACAM5, CLEC9, CLEC91, CRTH2, CSF-1, CSF-2, CSF-3, CXCL1, CXCL2, CXCL4, CXCL12, CXCL13, CXCR3, cMet, CTLA4, DLL3, DNGR-1, E-cadherin, EGFR, ENTPD1, EpCAM, FCER1, FCER1A, FCER2, FGFR, FLAP, FOLH1, Gi24, GITR, GITRL, GPR5, HER2, HER3, ICOSL, ICOS, HHLA2, HMGB1, HVEM, IDO, IFNa, IgE, IGF1R, IL2Rbeta, IL1, IL1A, IL1B, IL1F10, IL2, IL4, IL4Ra, IL5, IL5R, IL6, IL7, IL7Ra, IL8, IL9, IL9R, IL10, rhIL10, IL12, IL13, IL13Ra1, IL13Ra2, IL15, IL17, IL17Rb, IL18, IL22, IL23, IL25, IL7, IL33, IL35, ITGB4, ITK, KIR, LAG3, LAMP1, leptin, LPFS2, MHC class II, MUC-1, MUC-16, NCR3LG1, NKG2D, NKp46, NTPDase-1, OX40, OX40L, PD-1, PD-L1, PD-L2, PROM1, S1S2, SIRPalpha, SISP1, SLC, SPG64, ST2, STEAP1, STEAP2, Syk kinase, STEAP1, TROP2, TACI, TDO, T14, TIGIT, TIM3, TLR, TLR2, TLR4, TLR5, TLR9, TMEF1, TNFa, TNFRSF7, Tp55, TREM1, TSLP, TSLPR, TWEAK, VEGF, VISTA, Vstm3, WUCAM, DLL4, TGFbeta, GP100, GPRC5D, CD30 or CD16A; VL2 is a second immunoglobulin light chain variable region that specifically binds to A2AR, APRIL, ATPDase, BAFF, BAFFR, BCMA, BlyS, BTK, BTLA, B7DC, B7H1, B7H2, B7H3, B7H4, B7H5, B7H6, B7H7, B7RP1, B7-4, C3, C5, CCL2, CCL3, CCL4, CCL5, CCL7, CCL8, CCL11, CCL15, CCL17, CCL19, CCL20, CCL21, CCL25 CCR3, CCR4, CD3, CD19, CD20, CD24, CD27, CD28, CD38, CD39, CD40, CD40L, CD47, CD52, CD70, CD80, CD86, CD123, CD133, CD137, CD137L, CD160, CD272, CEACAM5, CLEC9, CLEC91, CRTH2, CSF-1, CSF-2, CSF-3, CXCL1, CXCL2, CXCL4, CXCL12, CXCL13, CXCR3, cMet, CTLA4, DLL3, DNGR-1, E-cadherin, EGFR, ENTPD1, EpCAM, FCER1, FCER1A, FCER2, FGFR, FLAP, FOLH1, Gi24, GITR, GITRL, GPR5, HER2, HER3, ICOSL, ICOS, HHLA2, HMGB1, HVEM, IDO, IFNa, IgE, IGF1R, IL2Rbeta, IL1, IL1A, IL1B, IL1F10, IL2, IL4, IL4Ra, IL5, IL5R, IL6, IL7, IL7Ra, IL8, IL9, IL9R, IL10, rhIL10, IL12, IL13, IL13Ra1, IL13Ra2, IL15, IL17, IL17Rb, IL18, IL22, IL23, IL25, IL7, IL33, IL35, ITGB4, ITK, KIR, LAG3, LAMP1, leptin, LPFS2, MHC class II, MUC-1, MUC-16, NCR3LG1, NKG2D, NKp46, NTPDase-1, OX40, OX40L, PD-1, PD-L1, PD-L2, PROM1, S152, SIRPalpha, SISP1, SLC, SPG64, ST2, STEAP1, STEAP2, Syk kinase, STEAP1, TROP2, TACI, TDO, T14, TIGIT, TIM3, TLR, TLR2, TLR4, TLRS, TLR9, TMEF1, TNFa, TNFRSF7, Tp55, TREM1, TSLP, TSLPR, TWEAK, VEGF, VISTA, Vstm3, WUCAM, DLL4, TGFbeta, GP100, GPRC5D, CD30 or CD16A; VL3 is a third immunoglobulin light chain variable region that specifically binds to A2AR, APRIL, ATPDase, BAFF, BAFFR, BCMA, BlyS, BTK, BTLA, B7DC, B7H1, B7H2, B7H3, B7H4, B7H5, B7H6, B7H7, B7RP1, B7-4, C3, C5, CCL2, CCL3, CCL4, CCL5, CCL7, CCL8, CCL11, CCL15, CCL17, CCL19, CCL20, CCL21, CCL25 CCR3, CCR4, CD3, CD19, CD20, CD24, CD27, CD28, CD38, CD39, CD40, CD40L, CD47, CD52, CD70, CD80, CD86, CD123, CD133, CD137, CD137L, CD160, CD272, CEACAM5, CLEC9, CLEC91, CRTH2, CSF-1, CSF-2, CSF-3, CXCL1, CXCL2, CXCL4, CXCL12, CXCL13, CXCR3, cMet, CTLA4, DLL3, DNGR-1, E-cadherin, EGFR, ENTPD1, EpCAM, FCER1, FCER1A, FCER2, FGFR, FLAP, FOLH1, Gi24, GITR, GITRL, GPR5, HER2, HER3, ICOSL, ICOS, HHLA2, HMGB1, HVEM, IDO, IFNa, IgE, IGF1R, I2Rbeta, IL1, IL1A, IL1B, IL1F10, IL2, IL4, IL4Ra, IL5, IL5R, IL6, IL7, IL7Ra, IL8, IL9, IL9R, IL10, rhIL10, IL12, IL13, IL13Ra1, IL13Ra2, IL15, IL17, IL17Rb, IL18, IL22, IL23, IL25, IL7, IL33, IL35, ITGB4, ITK, KIR, LAG3, LAMP1, leptin, LPFS2, MHC class II, MUC-1, MUC-16, NCR3LG1, NKG2D, NKp46, NTPDase-1, OX40, OX40L, PD-1, PD-L1, PD-L2, PROM1, S1S2, SIRPalpha, SISP1, SLC, SPG64, ST2, STEAP1, STEAP2, Syk kinase, STEAP1, TROP2, TACI, TDO, T14, TIGIT, TIM3, TLR, TLR2, TLR4, TLR5, TLR9, TMEF1, TNFa, TNFRSF7, Tp55, TREM1, TSLP, TSLPR, TWEAK, VEGF, VISTA, Vstm3, WUCAM, DLL4, TGFbeta, GP100, GPRC5D, CD30 or CD16A; VH1 is a first immunoglobulin heavy chain variable region that specifically binds to A2AR, APRIL, ATPDase, BAFF, BAFFR, BCMA, BlyS, BTK, BTLA, B7DC, B7H1, B7H2, B7H3, B7H4, B7H5, B7H6, B7H7, B7RP1, B7-4, C3, C5, CCL2, CCL3, CCL4, CCL5, CCL7, CCL8, CCL11, CCL15, CCL17, CCL19, CCL20, CCL21, CCL25 CCR3, CCR4, CD3, CD19, CD20, CD24, CD27, CD28, CD38, CD39, CD40, CD40L, CD47, CD52, CD70, CD80, CD86, CD123, CD133, CD137, CD137L, CD160, CD272, CEACAM5, CLEC9, CLEC91, CRTH2, CSF-1, CSF-2, CSF-3, CXCL1, CXCL2, CXCL4, CXCL12, CXCL13, CXCR3, cMet, CTLA4, DLL3, DNGR-1, E-cadherin, EGFR, ENTPD1, EpCAM, FCER1, FCER1A, FCER2, FGFR, FLAP, FOLH1, Gi24, GITR, GITRL, GPR5, HER2, HER3, ICOSL, ICOS, HHLA2, HMGB1, HVEM, IDO, IFNa, IgE, IGF1R, IL2Rbeta, IL1, IL1A, IL1B, IL1F10, IL2, IL4, IL4Ra, IL5, IL5R, IL6, IL7, IL7Ra, IL8, IL9, IL9R, IL10, rhIL10, IL12, IL13, R13Ra1, IL13Ra2, IL15, IL17, IL17Rb, IL18, IL22, IL23, IL25, IL7, IL33, IL35, ITGB4, ITK, KIR, LAG3, LAMP1, leptin, LPFS2, MHC class II, MUC-1, MUC-16, NCR3LG1, NKG2D, NKp46, NTPDase-1, OX40, OX40L, PD-1, PD-L1, PD-L2, PROM1, S152, SIRPalpha, SISP1, SLC, SPG64, ST2, STEAP1, STEAP2, Syk kinase, STEAP1, TROP2, TACI, TDO, T14, TIGIT, TIM3, TLR, TLR2, TLR4, TLRS, TLR9, TMEF1, TNFa, TNFRSF7, Tp55, TREM1, TSLP, TSLPR, TWEAK, VEGF, VISTA, Vstm3, WUCAM, DLL4, TGFbeta, GP100, GPRC5D, CD30 or CD16A; VH2 is a second immunoglobulin heavy chain variable region that specifically binds to A2AR, APRIL, ATPDase, BAFF, BAFFR, BCMA, BlyS, BTK, BTLA, B7DC, B7H1, B7H2, B7H3, B7H4, B7H5, B7H6, B7H7, B7RP1, B7-4, C3, C5, CCL2, CCL3, CCL4, CCL5, CCL7, CCL8, CCL11, CCL15, CCL17, CCL19, CCL20, CCL21, CCL25 CCR3, CCR4, CD3, CD19, CD20, CD24, CD27, CD28, CD38, CD39, CD40, CD40L, CD47, CD52, CD70, CD80, CD86, CD123, CD133, CD137, CD137L, CD160, CD272, CEACAM5, CLEC9, CLEC91, CRTH2, CSF-1, CSF-2, CSF-3, CXCL1, CXCL2, CXCL4, CXCL12, CXCL13, CXCR3, cMet, CTLA4, DLL3, DNGR-1, E-cadherin, EGFR, ENTPD1, EpCAM, FCER1, FCER1A, FCER2, FGFR, FLAP, FOLH1, Gi24, GITR, GITRL, GPR5, HER2, HER3, ICOSL, ICOS, HHLA2, HMGB1, HVEM, IDO, IFNa, IgE, IGF1R, I2Rbeta, IL1, IL1A, IL1B, IL1F10, IL2, IL4, IL4Ra, IL5, IL5R, IL6, IL7, IL7Ra, IL8, IL9, IL9R, IL10, rhIL10, IL12, IL13, IL13Ra1, IL13Ra2, IL15, IL17, IL17Rb, IL18, IL22, IL23, IL25, IL7, IL33, IL35, ITGB4, ITK, KIR, LAG3, LAMP1, leptin, LPFS2, MHC class II, MUC-1, MUC-16, NCR3LG1, NKG2D, NKp46, NTPDase-1, OX40, OX40L, PD-1, PD-L1, PD-L2, PROM1, S152, SIRPalpha, SISP1, SLC, SPG64, ST2, STEAP1, STEAP2, Syk kinase, STEAP1, TROP2, TACI, TDO, T14, TIGIT, TIM3, TLR, TLR2, TLR4, TLR5, TLR9, TMEF1, TNFa, TNFRSF7, Tp55, TREM1, TSLP, TSLPR, TWEAK, VEGF, VISTA, Vstm3, WUCAM, DLL4, TGFbeta, GP100, GPRC5D, CD30 or CD16A; VH3 is a third immunoglobulin heavy chain variable region that specifically binds to A2AR, APRIL, ATPDase, BAFF, BAFFR, BCMA, BlyS, BTK, BTLA, B7DC, B7H1, B7H2, B7H3, B7H4, B7H5, B7H6, B7H7, B7RP1, B7-4, C3, C5, CCL2, CCL3, CCL4, CCL5, CCL7, CCL8, CCL11, CCL15, CCL17, CCL19, CCL20, CCL21, CCL25 CCR3, CCR4, CD3, CD19, CD20, CD24, CD27, CD28, CD38, CD39, CD40, CD40L, CD47, CD52, CD70, CD80, CD86, CD123, CD133, CD137, CD137L, CD160, CD272, CEACAM5, CLEC9, CLEC91, CRTH2, CSF-1, CSF-2, CSF-3, CXCL1, CXCL2, CXCL4, CXCL12, CXCL13, CXCR3, cMet, CTLA4, DLL3, DNGR-1, E-cadherin, EGFR, ENTPD1, EpCAM, FCER1, FCER1A, FCER2, FGFR, FLAP, FOLH1, Gi24, GITR, GITRL, GPR5, HER2, HER3, ICOSL, ICOS, HHLA2, HMGB1, HVEM, IDO, IFNa, IgE, IGF1R, IL2Rbeta, IL1, IL1A, IL1B, IL1F10, IL2, IL4, IL4Ra, IL5, IL5R, IL6, IL7, IL7Ra, IL8, IL9, IL9R, IL10, rhIL10, IL12, IL13, IL13Ra1, IL13Ra2, IL15, IL17, IL17Rb, IL18, IL22, IL23, IL25, IL7, IL33, IL35, ITGB4, ITK, KIR, LAG3, LAMP1, leptin, LPFS2, MHC class II, MUC-1, MUC-16, NCR3LG1, NKG2D, NKp46, NTPDase-1, OX40, OX40L, PD-1, PD-L1, PD-L2, PROM1, S152, SIRPalpha, SISP1, SLC, SPG64, ST2, STEAP1, STEAP2, Syk kinase, STEAP1, TROP2, TACI, TDO, T14, TIGIT, TIM3, TLR, TLR2, TLR4, TLR5, TLR9, TMEF1, TNFa, TNFRSF7, Tp55, TREM1, TSLP, TSLPR, TWEAK, VEGF, VISTA, Vstm3, WUCAM, DLL4, TGFbeta, GP100, GPRC5D, CD30 or CD16A; Fe is a region comprising an immunoglobulin heavy chain constant region 2 (CH2), an immunoglobulin heavy chain constant region 3 (CH3), and optionally, an immunoglobulin hinge; CH1 is an immunoglobulin heavy chain constant region 1; CL is an immunoglobulin light chain constant region; and L1, L2, L3, L4 and L5 are amino acid linkers. In some aspects, the first polypeptide has a structure represented by VL1-VL2-VH2-VH1, the second polypeptide has a structure represented by VL3, and the third polypeptide has a structure represented by VH3; optionally wherein the first, second and/or third polypeptide comprises at least one of an Fc region, a CL region, and a CH1 region at the carboxy terminus of the first, second and/or third polypeptide, or wherein the first, second and/or third polypeptide comprises a CH1-CL, CL-CH1, CH1-Fc, CL-Fc, CL-CH1-Fc, CH1-CL-Fc at the carboxy terminus of the first, second and/or third polypeptide. In some aspects, the first polypeptide has a structure represented by VL1-VL2-VH2-VH1, the second polypeptide has a structure represented by VL3, and the third polypeptide has a structure represented by VH3; optionally wherein the first, second and/or third polypeptide comprises at least one of an Fc region, a CL region, and a CH1 region at the carboxy terminus of the first, second and/or third polypeptide, or wherein the first, second and/or third polypeptide comprises a CH1-CL, CL-CH1, CH1-Fc, CL-Fc, CL-CH1-Fc, CH1-CL-Fc at the carboxy terminus of the first, second and/or third polypeptide, wherein the CH1-CL, CL-CH1, CH1-Fc, CL-Fc, CL-CH1-Fc, or CH1-CL-Fc region is linked to the carboxy terminus of the second polypeptide via one or more amino acid linker, and wherein the CH1, CL and Fc when present in the second polypeptide are linked to each other via one or more amino acid linker. In some aspects, the first polypeptide has a structure represented by VL1-VL2-VH2-VH1, the second polypeptide has a structure represented by VL3, and the third polypeptide has a structure represented by VH3; optionally wherein the first, second and/or third polypeptide comprises at least one of an Fc region, a CL region, and a CH1 region at the carboxy terminus of the first, second and/or third polypeptide, or wherein the first, second and/or third polypeptide comprises a CH1-CL, CL-CH1, CH1-Fc, CL-Fc, CL-CH1-Fc, CH1-CL-Fc at the carboxy terminus of the first, second and/or third polypeptide, wherein the CH1-CL, CL-CH1, CH1-Fc, CL-Fc, CL-CH1-Fc, or CH1-CL-Fc region is linked to the carboxy terminus of the third polypeptide via one or more amino acid linker, and wherein the CH1, CL and Fc when present in the third polypeptide are linked to each other via one or more amino acid linker. In some aspects, the first polypeptide has a structure represented by VL1-VL2-VH2-VH1, the second polypeptide has a structure represented by VL3, and the third polypeptide has a structure represented by VH3; optionally wherein the first, second and/or third polypeptide comprises at least one of an Fc region, a CL region, and a CH1 region at the carboxy terminus of the first, second and/or third polypeptide, or wherein the first, second and/or third polypeptide comprises a CH1-CL, CL-CH1, CH1-Fc, CL-Fc, CL-CH1-Fc, CH1-CL-Fc at the carboxy terminus of the first, second and/or third polypeptide, wherein the CH1-CL, CL-CH1, CH1-Fc, CL-Fc, CL-CH1-Fc, or CH1-CL-Fc region is linked to the carboxy terminus of the second and third polypeptide via one or more amino acid linker, and wherein the CH1, CL and Fc when present in the second and third polypeptide are linked to each other via one or more amino acid linker. In some aspects, the first polypeptide has a structure represented by VL1-L1-VL2-L2-VH2-L3-VH1, the second polypeptide has a structure represented by VL3, and the third polypeptide has a structure represented by VH3; optionally wherein the first, second and/or third polypeptide comprises at least one of an Fc region, a CL region, and a CH1 region at the carboxy terminus of the first, second and/or third polypeptide, or wherein the first, second and/or third polypeptide comprises a CH1-CL, CL-CH1, CH1-Fc, CL-Fc, CL-CH1-Fc, CH1-CL-Fc at the carboxy terminus of the first, second and/or third polypeptide. In some aspects, the first polypeptide has a structure represented by VL1-L1-VL2-L2-VH2-L3-VH1, the second polypeptide has a structure represented by VL3 and the third polypeptide has a structure represented by VH3; optionally wherein the first, second and/or third polypeptide comprises at least one of an Fc region, a CL region, and a CH1 region at the carboxy terminus of the first, second and/or third polypeptide, wherein the at least one Fc region, CL region and CH1 region is linked to the carboxy terminus of the first, second and/or third polypeptide via one or more amino acid linker, or wherein the first, second and/or third polypeptide comprises a CH1-CL, CL-CH1, CH1-Fc, CL-Fc, CL-CH1-Fc, or CH1-CL-Fc, wherein the CH1-CL, CL-CH1, CH1-Fc, CL-Fc, CL-CH1-Fc, or CH1-CL-Fc region is linked to the carboxy terminus of the second polypeptide via one or more amino acid linker, and wherein the CH1, CL and Fc when present in the second polypeptide are linked to each other via one or more amino acid linker. In some aspects, the first polypeptide has a structure represented by VL1-L1-VL2-L2-VH2-L3-VH1, the second polypeptide has a structure represented by VL3 and the third polypeptide has a structure represented by VH3; optionally wherein the first, second and/or third polypeptide comprises at least one of an Fc region, a CL region, and a CH1 region at the carboxy terminus of the first, second and/or third polypeptide, wherein the at least one Fc region, CL region and CH1 region is linked to the carboxy terminus of the first, second and/or third polypeptide via one or more amino acid linker, or wherein the first, second and/or third polypeptide comprises a CH1-CL, CL-CH1, CH1-Fc, CL-Fc, CL-CH1-Fc, or CH1-CL-Fc, wherein the CH1-CL, CL-CH1, CH1-Fc, CL-Fc, CL-CH1-Fc, or CH1-CL-Fc region is linked to the carboxy terminus of the third polypeptide via one or more amino acid linker, and wherein the CH1, CL and Fc when present in the third polypeptide are linked to each other via one or more amino acid linker. In some aspects, the first polypeptide has a structure represented by VL1-L1-VL2-L2-VH2-L3-VH1, the second polypeptide has a structure represented by VL3 and the third polypeptide has a structure represented by VH3; optionally wherein the first, second and/or third polypeptide comprises at least one of an Fc region, a CL region, and a CH1 region at the carboxy terminus of the first, second and/or third polypeptide, wherein the at least one Fc region, CL region and CH1 region is linked to the carboxy terminus of the first, second and/or third polypeptide via one or more amino acid linker, or wherein the first, second and/or third polypeptide comprises a CH1-CL, CL-CH1, CH1-Fc, CL-Fc, CL-CH1-Fc, or CH1-CL-Fc, wherein the CH1-CL, CL-CH1, CH1-Fc, CL-Fc, CL-CH1-Fc, or CH1-CL-Fc region is linked to the carboxy terminus of the second and third polypeptide via one or more amino acid linker, and wherein the CH1, CL and Fc when present in the second and third polypeptide are linked to each other via one or more amino acid linker. In some aspects, the first polypeptide has a structure represented by VH1-VH2-VL2-VL1, the second polypeptide has a structure represented by VL3, and the third polypeptide has a structure represented by VH3; optionally wherein the first, second and/or third polypeptide comprises at least one of an Fc region, a CL region, and a CH1 region at the carboxy terminus of the first, second and/or third polypeptide, or wherein the first, second and/or third polypeptide comprises a CH1-CL, CL-CH1, CH1-Fc, CL-Fc, CL-CH1-Fc, CH1-CL-Fc at the carboxy terminus of the first, second and/or third polypeptide. In some aspects, the first polypeptide has a structure represented by VH1-VH2-VL2-VL1, the second polypeptide has a structure represented by VL3, and the third polypeptide has a structure represented by VH3; optionally wherein the first, second and/or third polypeptide comprises at least one of an Fc region, a CL region, and a CH1 region at the carboxy terminus of the first, second and/or third polypeptide, wherein the at least one Fc region, CL region and CH1 region is linked to the carboxy terminus of the first, second and/or third polypeptide via one or more amino acid linker, or wherein the first, second and/or third polypeptide comprises a CH1-CL, CL-CH1, CH1-Fc, CL-Fc, CL-CH1-Fc, or CH1-CL-Fc, wherein the CH1-CL, CL-CH1, CH1-Fc, CL-Fc, CL-CH1-Fc, or CH1-CL-Fc region is linked to the carboxy terminus of the second polypeptide via one or more amino acid linker, and wherein the CH1, CL and Fc when present in the second polypeptide are linked to each other via one or more amino acid linker. In some aspects, the first polypeptide has a structure represented by VH1-VH2-VL2-VL1, the second polypeptide has a structure represented by VL3, and the third polypeptide has a structure represented by VH3; optionally wherein the first, second and/or third polypeptide comprises at least one of an Fc region, a CL region, and a CH1 region at the carboxy terminus of the first, second and/or third polypeptide, wherein the at least one Fc region, CL region and CH1 region is linked to the carboxy terminus of the first, second and/or third polypeptide via one or more amino acid linker, or wherein the first, second and/or third polypeptide comprises a CH1-CL, CL-CH1, CH1-Fc, CL-Fc, CL-CH1-Fc, or CH1-CL-Fc, wherein the CH1-CL, CL-CH1, CH1-Fc, CL-Fc, CL-CH1-Fc, or CH1-CL-Fc region is linked to the carboxy terminus of the third polypeptide via one or more amino acid linker, and wherein the CH1, CL and Fc when present in the third polypeptide are linked to each other via one or more amino acid linker. In some aspects, the first polypeptide has a structure represented by VH1i-VH2-VL2-VL1, the second polypeptide has a structure represented by VL3, and the third polypeptide has a structure represented by VH3; optionally wherein the first, second and/or third polypeptide comprises at least one of an Fc region, a CL region, and a CH1 region at the carboxy terminus of the first, second and/or third polypeptide, wherein the at least one Fc region, CL region and CH1 region is linked to the carboxy terminus of the first, second and/or third polypeptide via one or more amino acid linker, or wherein the first, second and/or third polypeptide comprises a CH1-CL, CL-CH1, CH1-Fc, CL-Fc, CL-CH1-Fc, or CH1-CL-Fc, wherein the CH1-CL, CL-CH1, CH1-Fc, CL-Fc, CL-CH1-Fc, or CH1-CL-Fc region is linked to the carboxy terminus of the second and third polypeptide via one or more amino acid linker, and wherein the CH1, CL and Fc when present in the second and third polypeptide are linked to each other via one or more amino acid linker. In some aspects, the first polypeptide has a structure represented by VH1-L1-VH2-L2-VL2-L3-VL1, the second polypeptide has a structure represented by VL3, and the third polypeptide has a structure represented by VH3; optionally wherein the first, second and/or third polypeptide comprises at least one of an Fc region, a CL region, and a CH1 region at the carboxy terminus of the first, second and/or third polypeptide, or wherein the first, second and/or third polypeptide comprises a CH1-CL, CL-CH1, CH1-Fc, CL-Fc, CL-CH1-Fc, CH1-CL-Fc at the carboxy terminus of the first, second and/or third polypeptide. In some aspects, the first polypeptide has a structure represented by VH1-L1-VH2-L2-VL2-L3-VL1, the second polypeptide has a structure represented by VL3 and the third polypeptide has a structure represented by VH3; optionally wherein the first, second and/or third polypeptide comprises at least one of an Fc region, a CL region, and a CH1 region at the carboxy terminus of the first, second and/or third polypeptide, wherein the at least one Fc region, CL region and CH1 region is linked to the carboxy terminus of the first, second and/or third polypeptide via one or more amino acid linker, or wherein the first, second and/or third polypeptide comprises a CH1-CL, CL-CH1, CH1-Fc, CL-Fc, CL-CH1-Fc, or CH1-CL-Fc, wherein the CH1-CL, CL-CH1, CH1-Fc, CL-Fc, CL-CH1-Fc, or CH1-CL-Fc region is linked to the carboxy terminus of the second polypeptide via one or more amino acid linker, and wherein the CH1, CL and Fc when present in the second polypeptide are linked to each other via one or more amino acid linker. In some aspects, the first polypeptide has a structure represented by VH1-L1-VH2-L2-VL2-L3-VL1, the second polypeptide has a structure represented by VL3 and the third polypeptide has a structure represented by VH3; optionally wherein the first, second and/or third polypeptide comprises at least one of an Fc region, a CL region, and a CH1 region at the carboxy terminus of the first, second and/or third polypeptide, wherein the at least one Fc region, CL region and CH1 region is linked to the carboxy terminus of the first, second and/or third polypeptide via one or more amino acid linker, or wherein the first, second and/or third polypeptide comprises a CH1-CL, CL-CH1, CH1-Fc, CL-Fc, CL-CH1-Fc, or CH1-CL-Fc, wherein the CH1-CL, CL-CH1, CH1-Fc, CL-Fc, CL-CH1I-Fc, or CH1-CL-Fc region is linked to the carboxy terminus of the third polypeptide via one or more amino acid linker, and wherein the CH1, CL and Fc when present in the third polypeptide are linked to each other via one or more amino acid linker. In some aspects, the first polypeptide has a structure represented by VH1-L1-VH2-L2-VL2-L3-VL1, the second polypeptide has a structure represented by VL3 and the third polypeptide has a structure represented by VH3; optionally wherein the first, second and/or third polypeptide comprises at least one of an Fc region, a CL region, and a CH1 region at the carboxy terminus of the first, second and/or third polypeptide, wherein the at least one Fc region, CL region and CH1 region is linked to the carboxy terminus of the first, second and/or third polypeptide via one or more amino acid linker, or wherein the first, second and/or third polypeptide comprises a CH1-CL, CL-CH1, CH1-Fc, CL-Fc, CL-CH1-Fc, or CH1-CL-Fc, wherein the CH1-CL, CL-CH1, CH1-Fc, CL-Fc, CL-CH1-Fc, or CH1-CL-Fc region is linked to the carboxy terminus of the second and third polypeptide via one or more amino acid linker, and wherein the CH1, CL and Fc when present in the second and third polypeptide are linked to each other via one or more amino acid linker. The VL1, VL2, VL3, VH1, VH2, and/or VH3 may specifically bind to A2AR, APRIL, ATPDase, BAFF, BAFFR, BCMA, BlyS, BTK, BTLA, B7DC, B7H1, B7H2, B7H3, B7H4, B7H5, B7H6, B7H7, B7RP1, B7-4, C3, C5, CCL2, CCL3, CCL4, CCL5, CCL7, CCL8, CCL11, CCL15, CCL17, CCL19, CCL20, CCL21, CCL25 CCR3, CCR4, CD3, CD19, CD20, CD24, CD27, CD28, CD38, CD39, CD40, CD40L, CD47, CD52, CD70, CD80, CD86, CD123, CD133, CD137, CD137L, CD160, CD272, CEACAM5, CLEC9, CLEC91, CRTH2, CSF-1, CSF-2, CSF-3, CXCL1, CXCL2, CXCL4, CXCL12, CXCL13, CXCR3, cMet, CTLA4, DLL3, DNGR-1, E-cadherin, EGFR, ENTPD1, EpCAM, FCER1, FCER1A, FCER2, FGFR, FLAP, FOLH1, Gi24, GITR, GITRL, GPR5, HER2, HER3, ICOSL, ICOS, HHLA2, HMGB1, HVEM, IDO, IFNa, IgE, IGF1R, IL2Rbeta, IL1, IL1A, IL1B, IL1F10, IL2, IL4, IL4Ra, IL5, IL5R, IL6, IL7, IL7Ra, IL8, IL9, IL9R, IL10, rhIL10, IL12, IL13, IL13Ra1, IL13Ra2, IL15, IL17, IL17Rb, IL18, IL22, IL23, IL25, IL7, IL33, IL35, ITGB4, ITK, KIR, LAG3, LAMP1, leptin, LPFS2, MHC class II, MUC-1, MUC-16, NCR3LG1, NKG2D, NKp46, NTPDase-1, OX40, OX40L, PD-1, PD-L1, PD-L2, PROM1, S152, SIRPalpha, SISP1, SLC, SPG64, ST2, STEAP1, STEAP2, Syk kinase, STEAP1, TROP2, TACI, TDO, T14, TIGIT, TIM3, TLR, TLR2, TLR4, TLR5, TLR9, TMEF1, TNFa, TNFRSF7, Tp55, TREM1, TSLP, TSLPR, TWEAK, VEGF, VISTA, Vstm3, WUCAM, DLL4, TGFbeta, GP100, GPRC5D, CD30 or CD16A. For the avoidance of doubt, all the antigen binding polypeptide complex structures described herein can be combined with any one or more of the targets described herein. Any and all disclosure herein in relation to targets for antigen binding polypeptides of the invention is generally applicable, and applies equally and without reservation to each and every antigen binding polypeptide and antigen binding polypeptide complex described herein. For the avoidance of doubt, the VL1, VL2, VL3, VH1, VH2, and/or VH3 of each and every antigen binding polypeptide and antigen binding polypeptide complex described herein may independently bind to any one of said particularly preferred targets.

[0179] In another aspect, the invention is directed to an antigen binding polypeptide complex (e.g., an antibody or antigen binding fragment thereof) comprising a first polypeptide having a structure represented by VL1-VL2-VH2-VH1-Fc, VH1-VH2-VL2-VL1-Fc, VL1-L1-VL2-L2-VH2-L3-VH1-Fc, VH1-L1-VH2-L2-VL2-L3-VH1-Fc, VL1-L1-VL2-L2-VH2-L3-VH1-L4-Fc, or VH1-L1-VH2-L2-VL2-L3-VL1-L4-Fc; and a second polypeptide having a structure represented by VL3-VH3-Fc, VL3-L1-VH3-Fc, VH3-VL3-Fc, or VH3-L1-VL3-Fc; wherein VL1 is a first immunoglobulin light chain variable region that specifically binds to A2AR, APRIL, ATPDase, BAFF, BAFFR, BCMA, BlyS, BTK, BTLA, B7DC, B7H1, B7H2, B7H3, B7H4, B7H5, B7H6, B7H7, B7RP1, B7-4, C3, C5, CCL2, CCL3, CCL4, CCL5, CCL7, CCL8, CCL11, CCL15, CCL17, CCL19, CCL20, CCL21, CCL25 CCR3, CCR4, CD3, CD19, CD20, CD24, CD27, CD28, CD38, CD39, CD40, CD40L, CD47, CD52, CD70, CD80, CD86, CD123, CD133, CD137, CD137L, CD160, CD272, CEACAM5, CLEC9, CLEC91, CRTH2, CSF-1, CSF-2, CSF-3, CXCL1, CXCL2, CXCL4, CXCL12, CXCL13, CXCR3, cMet, CTLA4, DLL3, DNGR-1, E-cadherin, EGFR, ENTPD1, EpCAM, FCER1, FCER1A, FCER2, FGFR, FLAP, FOLH1, Gi24, GITR, GITRL, GPR5, HER2, HER3, ICOSL, ICOS, HHLA2, HMGB1, HVEM, IDO, IFNa, IgE, IGF1R, I2Rbeta, IL1, IL1A, IL1B, IL1F10, IL2, IL4, IL4Ra, IL1, IL5R, IL6, IL7, IL7Ra, IL8, IL9, IL9R, 110, rhIL10, IL12, IL13, IL13Ra1, IL13Ra2, IL15, 117, IL17Rb, IL18, IL22, IL23, IL25, IL7, IL33, IL35, ITGB4, ITK, KIR, LAG3, LAMP1, leptin, LPFS2, MHC class II, MUC-1, MUC-16, NCR3LG1, NKG2D, NKp46, NTPDase-1, OX40, OX40L, PD-1, PD-L1, PD-L2, PROM1, S1S2, SIRPalpha, SISP1, SLC, SPG64, ST2, STEAP1, STEAP2, Syk kinase, STEAP1, TROP2, TACI, TDO, T14, TIGIT, TIM3, TLR, TLR2, TLR4, TLR5, TLR9, TMEF1, TNFa, TNFRSF7, Tp55, TREM1, TSLP, TSLPR, TWEAK, VEGF, VISTA, Vstm3, WUCAM, DLL4, TGFbeta, GP100, GPRC5D, CD30 or CD16A; VL2 is a second immunoglobulin light chain variable region that specifically binds to A2AR, APRIL, ATPDase, BAFF, BAFFR, BCMA, BlyS, BTK, BTLA, B7DC, B7H1, B7H2, B7H3, B7H4, B7H5, B7H6, B7H7, B7RP1, B7-4, C3, C5, CCL2, CCL3, CCL4, CCL5, CCL7, CCL8, CCL11, CCL15, CCL17, CCL19, CCL20, CCL21, CCL25 CCR3, CCR4, CD3, CD19, CD20, CD24, CD27, CD28, CD38, CD39, CD40, CD40L, CD47, CD52, CD70, CD80, CD86, CD123, CD133, CD137, CD137L, CD160, CD272, CEACAM5, CLEC9, CLEC91, CRTH2, CSF-1, CSF-2, CSF-3, CXCL1, CXCL2, CXCL4, CXCL12, CXCL13, CXCR3, cMet, CTLA4, DLL3, DNGR-1, E-cadherin, EGFR, ENTPD1, EpCAM, FCER1, FCER1A, FCER2, FGFR, FLAP, FOLH1, Gi24, GITR, GITRL, GPR5, HER2, HER3, ICOSL, ICOS, HHLA2, HMGB1, HVEM, IDO, IFNa, IgE, IGF1R, IL2Rbeta, IL1, IL1A, IL1B, IL1F10, IL2, IL4, IL4Ra, IL5, IL5R, IL6, IL7, IL7Ra, IL8, I9, IL9R, IL10, rhIL10, IL12, IL13, I13Ra1, IL13Ra2, IL15, IL17, IL17Rb, IL18, IL22, IL23, IL25, IL7, IL33, IL35, ITGB4, ITK, KIR, LAG3, LAMP1, leptin, LPFS2, MHC class II, MUC-1, MUC-16, NCR3LG1, NKG2D, NKp46, NTPDase-1, OX40, OX40L, PD-1, PD-L1, PD-L2, PROM1, S152, SIRPalpha, SISP1, SLC, SPG64, ST2, STEAP1, STEAP2, Syk kinase, STEAP1, TROP2, TACI, TDO, T14, TIGIT, TIM3, TLR, TLR2, TLR4, TLRS, TLR9, TMEF1, TNFa, TNFRSF7, Tp55, TREM1, TSLP, TSLPR, TWEAK, VEGF, VISTA, Vstm3, WUCAM, DLL4, TGFbeta, GP100, GPRC5D, CD30 or CD16A; VL3 is a third immunoglobulin light chain variable region that specifically binds to A2AR, APRIL, ATPDase, BAFF, BAFFR, BCMA, BlyS, BTK, BTLA, B7DC, B7H1, B7H2, B7H3, B7H4, B7H5, B7H6, B7H7, B7RP1, B7-4, C3, C5, CCL2, CCL3, CCL4, CCL5, CCL7, CCL8, CCL11, CCL15, CCL17, CCL19, CCL20, CCL21, CCL25 CCR3, CCR4, CD3, CD19, CD20, CD24, CD27, CD28, CD38, CD39, CD40, CD40L, CD47, CD52, CD70, CD80, CD86, CD123, CD133, CD137, CD137L, CD160, CD272, CEACAM5, CLEC9, CLEC91, CRTH2, CSF-1, CSF-2, CSF-3, CXCL1, CXCL2, CXCL4, CXCL12, CXCL13, CXCR3, cMet, CTLA4, DLL3, DNGR-1, E-cadherin, EGFR, ENTPD1, EpCAM, FCER1, FCER1A, FCER2, FGFR, FLAP, FOLH1, Gi24, GITR, GITRL, GPR5, HER2, HER3, ICOSL, ICOS, HHLA2, HMGB1, HVEM, IDO, IFNa, IgE, IGF1R, IL2Rbeta, IL1, IL1A, IL1B, IL1F10, IL2, IL4, IL4Ra, IL5, IL5R, IL6, IL7, IL7Ra, IL8, IL9, IL9R, IL10, rhIL10, IL12, IL13, IL13Ra1, IL13Ra2, IL15, IL17, IL17Rb, IL18, IL22, IL23, IL25, IL7, IL33, IL35, ITGB4, ITK, KIR, LAG3, LAMP1, leptin, LPFS2, MHC class II, MUC-1, MUC-16, NCR3LG1, NKG2D, NKp46, NTPDase-1, OX40, OX40L, PD-1, PD-L1, PD-L2, PROM1, S152, SIRPalpha, SISP1, SLC, SPG64, ST2, STEAP1, STEAP2, Syk kinase, STEAP1, TROP2, TACI, TDO, T14, TIGIT, TIM3, TLR, TLR2, TLR4, TLRS, TLR9, TMEF1, TNFa, TNFRSF7, Tp55, TREM1, TSLP, TSLPR, TWEAK, VEGF, VISTA, Vstm3, WUCAM, DLL4, TGFbeta, GP100, GPRC5D, CD30 or CD16A; VH1 is a first immunoglobulin heavy chain variable region that specifically binds to A2AR, APRIL, ATPDase, BAFF, BAFFR, BCMA, BlyS, BTK, BTLA, B7DC, B7H1, B7H2, B7H3, B7H4, B7H5, B7H6, B7H7, B7RP1, B7-4, C3, C5, CCL2, CCL3, CCL4, CCL5, CCL7, CCL8, CCL11, CCL15, CCL17, CCL19, CCL20, CCL21, CCL25 CCR3, CCR4, CD3, CD19, CD20, CD24, CD27, CD28, CD38, CD39, CD40, CD40L, CD47, CD52, CD70, CD80, CD86, CD123, CD133, CD137, CD137L, CD160, CD272, CEACAM5, CLEC9, CLEC91, CRTH2, CSF-1, CSF-2, CSF-3, CXCL1, CXCL2, CXCL4, CXCL12, CXCL13, CXCR3, cMet, CTLA4, DLL3, DNGR-1, E-cadherin, EGFR, ENTPD1, EpCAM, FCER1, FCER1A, FCER2, FGFR, FLAP, FOLH1, Gi24, GITR, GITRL, GPR5, HER2, HER3, ICOSL, ICOS, HHLA2, HMGB1, HVEM, IDO, IFNa, IgE, IGF1R, IL2Rbeta, IL1, IL1A, IL1B, IL1F10, IL2, IL4, IL4Ra, IL5, IL5R, IL6, IL7, IL7Ra, I8, IL9, IL9R, IL10, rhIL10, IL12, IL13, I13Ra1, IL13Ra2, IL15, IL17, IL17Rb, IL18, IL22, IL23, IL25, IL7, IL33, IL35, ITGB4, ITK, KIR, LAG3, LAMP1, leptin, LPFS2, MHC class II, MUC-1, MUC-16, NCR3LG1, NKG2D, NKp46, NTPDase-1, OX40, OX40L, PD-1, PD-L1, PD-L2, PROM1, S152, SIRPalpha, SISP1, SLC, SPG64, ST2, STEAP1, STEAP2, Syk kinase, STEAP1, TROP2, TACI, TDO, T14, TIGIT, TIM3, TLR, TLR2, TLR4, TLR5, TLR9, TMEF1, TNFa, TNFRSF7, Tp55, TREM1, TSLP, TSLPR, TWEAK, VEGF, VISTA, Vstm3, WUCAM, DLL4, TGFbeta, GP100, GPRC5D, CD30 or CD16A; VH2 is a second immunoglobulin heavy chain variable region that specifically binds to A2AR, APRIL, ATPDase, BAFF, BAFFR, BCMA, BlyS, BTK, BTLA, B7DC, B7H1, B7H2, B7H3, B7H4, B7H5, B7H6, B7H7, B7RP1, B7-4, C3, C5, CCL2, CCL3, CCL4, CCL5, CCL7, CCL8, CCL11, CCL15, CCL17, CCL19, CCL20, CCL21, CCL25 CCR3, CCR4, CD3, CD19, CD20, CD24, CD27, CD28, CD38, CD39, CD40, CD40L, CD47, CD52, CD70, CD80, CD86, CD123, CD133, CD137, CD137L, CD160, CD272, CEACAM5, CLEC9, CLEC91, CRTH2, CSF-1, CSF-2, CSF-3, CXCL1, CXCL2, CXCL4, CXCL12, CXCL13, CXCR3, cMet, CTLA4, DLL3, DNGR-1, E-cadherin, EGFR, ENTPD1, EpCAM, FCER1, FCER1A, FCER2, FGFR, FLAP, FOLH1, Gi24, GITR, GITRL, GPR5, HER2, HER3, ICOSL, ICOS, HHLA2, HMGB1, HVEM, IDO, IFNa, IgE, IGF1R, IL2Rbeta, IL1, IL1A, IL1B, IL1F10, IL2, IL4, IL4Ra, IL5, IL5R, IL6, IL7, IL7Ra, IL8, IL9, IL9R, IL10, rhIL10, IL12, IL13, IL13Ra1, IL13Ra2, IL15, IL17, IL17Rb, IL18, IL22, IL23, IL25, IL7, IL33, IL35, ITGB4, ITK, KIR, LAG3, LAMP1, leptin, LPFS2, MHC class II, MUC-1, MUC-16, NCR3LG1, NKG2D, NKp46, NTPDase-1, OX40, OX40L, PD-1, PD-L1, PD-L2, PROM1, S152, SIRPalpha, SISP1, SLC, SPG64, ST2, STEAP1, STEAP2, Syk kinase, STEAP1, TROP2, TACI, TDO, T14, TIGIT, TIM3, TLR, TLR2, TLR4, TLR5, TLR9, TMEF1, TNFa, TNFRSF7, Tp55, TREM1, TSLP, TSLPR, TWEAK, VEGF, VISTA, Vstm3, WUCAM, DLL4, TGFbeta, GP100, GPRC5D, CD30 or CD16A; VH3 is a third immunoglobulin heavy chain variable region that specifically binds to A2AR, APRIL, ATPDase, BAFF, BAFFR, BCMA, BlyS, BTK, BTLA, B7DC, B7H1, B7H2, B7H3, B7H4, B7H5, B7H6, B7H7, B7RP1, B7-4, C3, C5, CCL2, CCL3, CCL4, CCL5, CCL7, CCL8, CCL11, CCL15, CCL17, CCL19, CCL20, CCL21, CCL25 CCR3, CCR4, CD3, CD19, CD20, CD24, CD27, CD28, CD38, CD39, CD40, CD40L, CD47, CD52, CD70, CD80, CD86, CD123, CD133, CD137, CD137L, CD160, CD272, CEACAM5, CLEC9, CLEC91, CRTH2, CSF-1, CSF-2, CSF-3, CXCL1, CXCL2, CXCL4, CXCL12, CXCL13, CXCR3, cMet, CTLA4, DLL3, DNGR-1, E-cadherin, EGFR, ENTPD1, EpCAM, FCER1, FCER1A, FCER2, FGFR, FLAP, FOLH1, Gi24, GITR, GITRL, GPRS, HER2, HER3, ICOSL, ICOS, HHLA2, HMGB1, HVEM, IDO, IFNa, IgE, IGF1R, IL2Rbeta, IL1, IL1A, IL1B, IL1F10, IL2, IL4, IL4Ra, IL5, IL5R, IL6, IL7, IL7Ra, IL8, IL9, IL9R, IL10, rhIL10, IL12, IL13, IL13Ra1, IL13Ra2, IL15, IL17, IL17Rb, IL18, IL22, IL23, IL25, IL7, IL33, IL35, ITGB4, ITK, KIR, LAG3, LAMP1, leptin, LPFS2, MHC class II, MUC-1, MUC-16, NCR3LG1, NKG2D, NKp46, NTPDase-1, OX40, OX40L, PD-1, PD-L1, PD-L2, PROM1, S152, SIRPalpha, SISP1, SLC, SPG64, ST2, STEAP1, STEAP2, Syk kinase, STEAP1, TROP2, TACI, TDO, T14, TIGIT, TIM3, TLR, TLR2, TLR4, TLR5, TLR9, TMEF1, TNFa, TNFRSF7, Tp55, TREM1, TSLP, TSLPR, TWEAK, VEGF, VISTA, Vstm3, WUCAM, DLL4, TGFbeta, GP100, GPRC5D, CD30 or CD16A; Fe is a region comprising an immunoglobulin heavy chain constant region 2 (CH2), an immunoglobulin heavy chain constant region 3 (CH3), and optionally, an immunoglobulin hinge; and L1, L2, L3 and L4 are amino acid linkers. In some aspects, VH1 and VL1 specifically bind to CD3, VH2 and VL2 specifically bind to CD28, and VH3 and VL3 specifically bind to CD38. In another aspect, VH1 and VL1 specifically bind to CD3, VH2 and VL2 specifically bind to CD28, and VH3 and VL3 specifically bind to CD19. In another aspect, VH1 and VL1 specifically bind to CD28, VH2 and VL2 specifically bind to CD3, and VH3 and VL3 specifically bind to CD38. In another aspect, VH1 and VL1 specifically bind to CD28, VH2 and VL2 specifically bind to CD3, and VH3 and VL3 specifically bind to CD19. In some aspects, the first polypeptide has a structure represented by VL1-VL2-VH2-VH1-Fc, VH1-VH2-VL2-VL1-Fc, VL1-L1-VL2-L2-VH2-L3-VH1-Fc, VH1-L1-VH2-L2-VL2-L3-VH1-Fc, VL1-L1-VL2-L2-VH2-L3-VH1-L4-Fc, or VH1-L1-VH2-L2-VL2-L3-VL1-L4-Fc and a second polypeptide having a structure represented by VL3-VH3-Fc. In some aspects, the first polypeptide has a structure represented by VL1-VL2-VH2-VH1-Fc, VH1-VH2-VL2-VL1-Fc, VL1-L1-VL2-L2-VH2-L3-VH1-Fc, VH1-L1-VH2-L2-VL2-L3-VH1-Fc, VL1-L1-VL2-L2-VH2-L3-VH1-L4-Fc, or VH1-L1-VH2-L2-VL2-L3-VL1-L4-Fc and a second polypeptide having a structure represented by VL3-L1-VH3-Fc. In some aspects, the first polypeptide has a structure represented by VL1-VL2-VH2-VH1-Fc, VH1-VH2-VL2-VL1-Fc, VL1-L1-VL2-L2-VH2-L3-VH1-Fc, VH1-L1-VH2-L2-VL2-L3-VH1-Fc, VL1-L1-VL2-L2-VH2-L3-VH1-L4-Fc, or VH1-L1-VH2-L2-VL2-L3-VL1-L4-Fc and a second polypeptide having a structure represented by VH3-VL3-Fc. In some aspects, the first polypeptide has a structure represented by VL1-VL2-VH2-VH1-Fc, VH1-VH2-VL2-VL1-Fc, VL1-L1-VL2-L2-VH2-L3-VH1-Fc, VH1-L1-VH2-L2-VL2-L3-VH1-Fc, VL1-L1-VL2-L2-VH2-L3-VH1-L4-Fc, or VH1-L1-VH2-L2-VL2-L3-VL1-L4-Fc and a second polypeptide having a structure represented by VH3-L1-VL3-Fc. The VL1, VL2, VL3, VH1, VH2, and/or VH3 may specifically bind to A2AR, APRIL, ATPDase, BAFF, BAFFR, BCMA, BlyS, BTK, BTLA, B7DC, B7H1, B7H2, B7H3, B7H4, B7H5, B7H6, B7H7, B7RP1, B7-4, C3, C5, CCL2, CCL3, CCL4, CCL5, CCL7, CCL8, CCL11, CCL15, CCL17, CCL19, CCL20, CCL21, CCL25 CCR3, CCR4, CD3, CD19, CD20, CD24, CD27, CD28, CD38, CD39, CD40, CD40L, CD47, CD52, CD70, CD80, CD86, CD123, CD133, CD137, CD137L, CD160, CD272, CEACAM5, CLEC9, CLEC91, CRTH2, CSF-1, CSF-2, CSF-3, CXCL1, CXCL2, CXCL4, CXCL12, CXCL13, CXCR3, cMet, CTLA4, DLL3, DNGR-1, E-cadherin, EGFR, ENTPD1, EpCAM, FCER1, FCER1A, FCER2, FGFR, FLAP, FOLH1, Gi24, GITR, GITRL, GPR5, HER2, HER3, ICOSL, ICOS, HHLA2, HMGB1, HVEM, IDO, IFNa, IgE, IGF1R, IL2Rbeta, IL1, IL1A, IL1B, IL1F10, IL2, IL4, IL4Ra, IL5, IL5R, IL6, IL7, IL7Ra, IL8, IL9, IL9R, IL10, rhIL10, IL12, IL13, IL13Ra1, IL13Ra2, IL15, IL17, IL17Rb, IL18, IL22, IL23, IL25, IL7, IL33, IL35, ITGB4, ITK, KIR, LAG3, LAMP1, leptin, LPFS2, MHC class II, MUC-1, MUC-16, NCR3LG1, NKG2D, NKp46, NTPDase-1, OX40, OX40L, PD-1, PD-L1, PD-L2, PROM1, S152, SIRPalpha, SISP1, SLC, SPG64, ST2, STEAP1, STEAP2, Syk kinase, STEAP1, TROP2, TACI, TDO, T14, TIGIT, TIM3, TLR, TLR2, TLR4, TLR5, TLR9, TMEF1, TNFa, TNFRSF7, Tp55, TREM1, TSLP, TSLPR, TWEAK, VEGF, VISTA, Vstm3, WUCAM, DLL4, TGFbeta, GP100, GPRC5D, CD30 or CD16A. For the avoidance of doubt, all the antigen binding polypeptide complex structures described herein can be combined with any one or more of the targets described herein. Any and all disclosure herein in relation to targets for antigen binding polypeptides of the invention is generally applicable, and applies equally and without reservation to each and every antigen binding polypeptide and antigen binding polypeptide complex described herein. For the avoidance of doubt, the VL1, VL2, VL3, VH1, VH2, and/or VH3 of each and every antigen binding polypeptide and antigen binding polypeptide complex described herein may independently bind to any one of said particularly preferred targets.

[0180] In another aspect, the invention is directed to an antigen binding polypeptide complex (e.g., an antibody or antigen binding fragment thereof) comprising a first polypeptide having a structure represented by VL1-VL2-VH2-VH1-Fc, VH1-VH2-VL2-VL1-Fc, VL1-L1-VL2-L2-VH2-L3-VH1-Fc, VH1-L1-VH2-L2-VL2-L3-VH1-Fc, VL1-L1-VL2-L2-VH2-L3-VH1-L4-Fc, or VH1-L1-VH2-L2-VL2-L3-VL1-L4-Fc; a second polypeptide having a structure represented by VH3-CH1-Fc, VH3-L1-CH1-Fc, VL3-CH1-Fc, or VL3-L1-CH1-Fc; and a third polypeptide having a structure represented by VL3-CL, VL3-L1-CL, VH3-CL, or VH3-L1-CL; wherein VL1 is a first immunoglobulin light chain variable region that specifically binds to A2AR, APRIL, ATPDase, BAFF, BAFFR, BCMA, BlyS, BTK, BTLA, B7DC, B7H1, B7H2, B7H3, B7H4, B7H5, B7H6, B7H7, B7RP1, B7-4, C3, C5, CCL2, CCL3, CCL4, CCL5, CCL7, CCL8, CCL11, CCL15, CCL17, CCL19, CCL20, CCL21, CCL25 CCR3, CCR4, CD3, CD19, CD20, CD24, CD27, CD28, CD38, CD39, CD40, CD40L, CD47, CD52, CD70, CD80, CD86, CD123, CD133, CD137, CD137L, CD160, CD272, CEACAM5, CLEC9, CLEC91, CRTH2, CSF-1, CSF-2, CSF-3, CXCL1, CXCL2, CXCL4, CXCL12, CXCL13, CXCR3, cMet, CTLA4, DLL3, DNGR-1, E-cadherin, EGFR, ENTPD1, EpCAM, FCER1, FCER1A, FCER2, FGFR, FLAP, FOLH1, Gi24, GITR, GITRL, GPR5, HER2, HER3, ICOSL, ICOS, HHLA2, HMGB1, HVEM, IDO, IFNa, IgE, IGF1R, IL2Rbeta, IL1, IL1A, IL1B, IL1F10, IL2, IL4, IL4Ra, IL5, IL5R, IL6, IL7, IL7Ra, IL8, IL9, IL9R, 110, rhIL10, IL12, IL13, IL13Ra1, IL13Ra2, IL15, 117, IL17Rb, IL18, IL22, IL23, IL25, IL7, IL33, IL35, ITGB4, ITK, KIR, LAG3, LAMP1, leptin, LPFS2, MHC class II, MUC-1, MUC-16, NCR3LG1, NKG2D, NKp46, NTPDase-1, OX40, OX40L, PD-1, PD-L1, PD-L2, PROM1, S152, SIRPalpha, SISP1, SLC, SPG64, ST2, STEAP1, STEAP2, Syk kinase, STEAP1, TROP2, TACI, TDO, T14, TIGIT, TIM3, TLR, TLR2, TLR4, TLR5, TLR9, TMEF1, TNFa, TNFRSF7, Tp55, TREM1, TSLP, TSLPR, TWEAK, VEGF, VISTA, Vstm3, WUCAM, DLL4, TGFbeta, GP100, GPRC5D, CD30 or CD16A; VL2 is a second immunoglobulin light chain variable region that specifically binds to A2AR, APRIL, ATPDase, BAFF, BAFFR, BCMA, BlyS, BTK, BTLA, B7DC, B7H1, B7H2, B7H3, B7H4, B7H5, B7H6, B7H7, B7RP1, B7-4, C3, C5, CCL2, CCL3, CCL4, CCL5, CCL7, CCL8, CCL11, CCL15, CCL17, CCL19, CCL20, CCL21, CCL25 CCR3, CCR4, CD3, CD19, CD20, CD24, CD27, CD28, CD38, CD39, CD40, CD40L, CD47, CD52, CD70, CD80, CD86, CD123, CD133, CD137, CD137L, CD160, CD272, CEACAM5, CLEC9, CLEC91, CRTH2, CSF-1, CSF-2, CSF-3, CXCL1, CXCL2, CXCL4, CXCL12, CXCL13, CXCR3, cMet, CTLA4, DLL3, DNGR-1, E-cadherin, EGFR, ENTPD1, EpCAM, FCER1, FCER1A, FCER2, FGFR, FLAP, FOLH1, Gi24, GITR, GITRL, GPR5, HER2, HER3, ICOSL, ICOS, HHLA2, HMGB1, HVEM, IDO, IFNa, IgE, IGF1R, IL2Rbeta, IL1, IL1A, IL1B, IL1F10, IL2, IL4, IL4Ra, IL5, IL5R, IL6, IL7, IL7Ra, IL8, IL9, IL9R, IL10, rhIL10, IL12, IL13, IL13Ra1, IL13Ra2, IL15, IL17, IL17Rb, IL18, IL22, IL23, IL25, IL7, IL33, IL35, ITGB4, ITK, KIR, LAG3, LAMP1, leptin, LPFS2, MHC class II, MUC-1, MUC-16, NCR3LG1, NKG2D, NKp46, NTPDase-1, OX40, OX40L, PD-1, PD-L1, PD-L2, PROM1, S152, SIRPalpha, SISP1, SLC, SPG64, ST2, STEAP1, STEAP2, Syk kinase, STEAP1, TROP2, TACI, TDO, T14, TIGIT, TIM3, TLR, TLR2, TLR4, TLR5, TLR9, TMEF1, TNFa, TNFRSF7, Tp55, TREM1, TSLP, TSLPR, TWEAK, VEGF, VISTA, Vstm3, WUCAM, DLL4, TGFbeta, GP100, GPRC5D, CD30 or CD16A; VL3 is a third immunoglobulin light chain variable region that specifically binds to A2AR, APRIL, ATPDase, BAFF, BAFFR, BCMA, BlyS, BTK, BTLA, B7DC, B7H1, B7H2, B7H3, B7H4, B7H5, B7H6, B7H7, B7RP1, B7-4, C3, C5, CCL2, CCL3, CCL4, CCL5, CCL7, CCL8, CCL11, CCL15, CCL17, CCL19, CCL20, CCL21, CCL25 CCR3, CCR4, CD3, CD19, CD20, CD24, CD27, CD28, CD38, CD39, CD40, CD40L, CD47, CD52, CD70, CD80, CD86, CD123, CD133, CD137, CD137L, CD160, CD272, CEACAM5, CLEC9, CLEC91, CRTH2, CSF-1, CSF-2, CSF-3, CXCL1, CXCL2, CXCL4, CXCL12, CXCL13, CXCR3, cMet, CTLA4, DLL3, DNGR-1, E-cadherin, EGFR, ENTPD1, EpCAM, FCER1, FCER1A, FCER2, FGFR, FLAP, FOLH1, Gi24, GITR, GITRL, GPR5, HER2, HER3, ICOSL, ICOS, HHLA2, HMGB1, HVEM, IDO, IFNa, IgE, IGF1R, I2Rbeta, IL1, IL1A, IL1B, IL1F10, IL2, IL4, IL4Ra, IL5, IL5R, IL6, IL7, IL7Ra, IL8, IL9, IL9R, IL10, rhIL10, IL12, IL13, IL13Ra1, IL13Ra2, IL15, IL17, IL17Rb, IL18, IL22, IL23, IL25, IL7, IL33, IL35, ITGB4, ITK, KIR, LAG3, LAMP1, leptin, LPFS2, MHC class II, MUC-1, MUC-16, NCR3LG1, NKG2D, NKp46, NTPDase-1, OX40, OX40L, PD-1, PD-L1, PD-L2, PROM1, S1S2, SIRPalpha, SISP1, SLC, SPG64, ST2, STEAP1, STEAP2, Syk kinase, STEAP1, TROP2, TACI, TDO, T14, TIGIT, TIM3, TLR, TLR2, TLR4, TLR5, TLR9, TMEF1, TNFa, TNFRSF7, Tp55, TREM1, TSLP, TSLPR, TWEAK, VEGF, VISTA, Vstm3, WUCAM, DLL4, TGFbeta, GP100, GPRC5D, CD30 or CD16A; VH1 is a first immunoglobulin heavy chain variable region that specifically binds to A2AR, APRIL, ATPDase, BAFF, BAFFR, BCMA, BlyS, BTK, BTLA, B7DC, B7H1, B7H2, B7H3, B7H4, B7H5, B7H6, B7H7, B7RP1, B7-4, C3, C5, CCL2, CCL3, CCL4, CCL5, CCL7, CCL8, CCL11, CCL15, CCL17, CCL19, CCL20, CCL21, CCL25 CCR3, CCR4, CD3, CD19, CD20, CD24, CD27, CD28, CD38, CD39, CD40, CD40L, CD47, CD52, CD70, CD80, CD86, CD123, CD133, CD137, CD137L, CD160, CD272, CEACAM5, CLEC9, CLEC91, CRTH2, CSF-1, CSF-2, CSF-3, CXCL1, CXCL2, CXCL4, CXCL12, CXCL13, CXCR3, cMet, CTLA4, DLL3, DNGR-1, E-cadherin, EGFR, ENTPD1, EpCAM, FCER1, FCER1A, FCER2, FGFR, FLAP, FOLH1, Gi24, GITR, GITRL, GPR5, HER2, HER3, ICOSL, ICOS, HHLA2, HMGB1, HVEM, IDO, IFNa, IgE, IGF1R, IL2Rbeta, IL1, IL1A, IL1B, IL1F10, IL2, IL4, IL4Ra, IL5, IL5R, IL6, IL7, IL7Ra, IL8, IL9, IL9R, IL10, rhIL10, IL12, IL13, R13Ra1, IL13Ra2, IL15, IL17, IL17Rb, IL18, IL22, IL23, IL25, IL7, IL33, IL35, ITGB4, ITK, KIR, LAG3, LAMP1, leptin, LPFS2, MHC class II, MUC-1, MUC-16, NCR3LG1, NKG2D, NKp46, NTPDase-1, OX40, OX40L, PD-1, PD-L1, PD-L2, PROM1, S152, SIRPalpha, SISP1, SLC, SPG64, ST2, STEAP1, STEAP2, Syk kinase, STEAP1, TROP2, TACI, TDO, T14, TIGIT, TIM3, TLR, TLR2, TLR4, TLRS, TLR9, TMEF1, TNFa, TNFRSF7, Tp55, TREM1, TSLP, TSLPR, TWEAK, VEGF, VISTA, Vstm3, WUCAM, DLL4, TGFbeta, GP100, GPRC5D, CD30 or CD16A; VH2 is a second immunoglobulin heavy chain variable region that specifically binds to A2AR, APRIL, ATPDase, BAFF, BAFFR, BCMA, BlyS, BTK, BTLA, B7DC, B7H1, B7H2, B7H3, B7H4, B7H5, B7H6, B7H7, B7RP1, B7-4, C3, C5, CCL2, CCL3, CCL4, CCL5, CCL7, CCL8, CCL11, CCL15, CCL17, CCL19, CCL20, CCL21, CCL25 CCR3, CCR4, CD3, CD19, CD20, CD24, CD27, CD28, CD38, CD39, CD40, CD40L, CD47, CD52, CD70, CD80, CD86, CD123, CD133, CD137, CD137L, CD160, CD272, CEACAM5, CLEC9, CLEC91, CRTH2, CSF-1, CSF-2, CSF-3, CXCL1, CXCL2, CXCL4, CXCL12, CXCL13, CXCR3, cMet, CTLA4, DLL3, DNGR-1, E-cadherin, EGFR, ENTPD1, EpCAM, FCER1, FCER1A, FCER2, FGFR, FLAP, FOLH1, Gi24, GITR, GITRL, GPR5, HER2, HER3, ICOSL, ICOS, HHLA2, HMGB1, HVEM, IDO, IFNa, IgE, IGF1R, I2Rbeta, IL1, IL1A, IL1B, IL1F10, IL2, IL4, IL4Ra, IL5, IL5R, IL6, IL7, IL7Ra, IL8, IL9, IL9R, IL10, rhIL10, IL12, IL13, IL13Ra1, IL13Ra2, IL15, IL17, IL17Rb, IL18, IL22, IL23, IL25, IL7, IL33, IL35, ITGB4, ITK, KIR, LAG3, LAMP1, leptin, LPFS2, MHC class II, MUC-1, MUC-16, NCR3LG1, NKG2D, NKp46, NTPDase-1, OX40, OX40L, PD-1, PD-L1, PD-L2, PROM1, S152, SIRPalpha, SISP1, SLC, SPG64, ST2, STEAP1, STEAP2, Syk kinase, STEAP1, TROP2, TACI, TDO, T14, TIGIT, TIM3, TLR, TLR2, TLR4, TLRS, TLR9, TMEF1, TNFa, TNFRSF7, Tp55, TREM1, TSLP, TSLPR, TWEAK, VEGF, VISTA, Vstm3, WUCAM, DLL4, TGFbeta, GP100, GPRC5D, CD30 or CD16A; VH3 is a third immunoglobulin heavy chain variable region that specifically binds to A2AR, APRIL, ATPDase, BAFF, BAFFR, BCMA, BlyS, BTK, BTLA, B7DC, B7H1, B7H2, B7H3, B7H4, B7H5, B7H6, B7H7, B7RP1, B7-4, C3, C5, CCL2, CCL3, CCL4, CCL5, CCL7, CCL8, CCL11, CCL15, CCL17, CCL19, CCL20, CCL21, CCL25 CCR3, CCR4, CD3, CD19, CD20, CD24, CD27, CD28, CD38, CD39, CD40, CD40L, CD47, CD52, CD70, CD80, CD86, CD123, CD133, CD137, CD137L, CD160, CD272, CEACAM5, CLEC9, CLEC91, CRTH2, CSF-1, CSF-2, CSF-3, CXCL1, CXCL2, CXCL4, CXCL12, CXCL13, CXCR3, cMet, CTLA4, DLL3, DNGR-1, E-cadherin, EGFR, ENTPD1, EpCAM, FCER1, FCER1A, FCER2, FGFR, FLAP, FOLH1, Gi24, GITR, GITRL, GPR5, HER2, HER3, ICOSL, ICOS, HHLA2, HMGB1, HVEM, IDO, IFNa, IgE, IGF1R, IL2Rbeta, IL1, IL1A, IL1B, IL1F10, IL2, IL4, IL4Ra, IL5, IL5R, IL6, IL7, IL7Ra, IL8, IL9, IL9R, IL10, rhIL10, IL12, IL13, IL13Ra1, IL13Ra2, IL15, IL17, IL17Rb, IL18, IL22, IL23, IL25, IL7, IL33, IL35, ITGB4, ITK, KIR, LAG3, LAMP1, leptin, LPFS2, MHC class II, MUC-1, MUC-16, NCR3LG1, NKG2D, NKp46, NTPDase-1, OX40, OX40L, PD-1, PD-L1, PD-L2, PROM1, S152, SIRPalpha, SISP1, SLC, SPG64, ST2, STEAP1, STEAP2, Syk kinase, STEAP1, TROP2, TACI, TDO, T14, TIGIT, TIM3, TLR, TLR2, TLR4, TLR5, TLR9, TMEF1, TNFa, TNFRSF7, Tp55, TREM1, TSLP, TSLPR, TWEAK, VEGF, VISTA, Vstm3, WUCAM, DLL4, TGFbeta, GP100, GPRC5D, CD30 or CD16A; Fe is a region comprising an immunoglobulin heavy chain constant region 2 (CH2), an immunoglobulin heavy chain constant region 3 (CH3), and optionally, an immunoglobulin hinge; CH1 is an immunoglobulin heavy chain constant region 1; CL is an immunoglobulin light chain constant region; and L1, L2, L3 and L4 are amino acid linkers. In some aspects, VH1 and VL1 specifically bind to CD3, VH2 and VL2 specifically bind to CD28, and VH3 and VL3 specifically bind to CD38. In another aspect, VH1 and VL1 specifically bind to CD3, VH2 and VL2 specifically bind to CD28, and VH3 and VL3 specifically bind to CD19. In another aspect, VH1 and VL1 specifically bind to CD28, VH2 and VL2 specifically bind to CD3, and VH3 and VL3 specifically bind to CD38. In another aspect, VH1 and VL1 specifically bind to CD28, VH2 and VL2 specifically bind to CD3, and VH3 and VL3 specifically bind to CD19. In some aspects, the first polypeptide has a structure represented by VL1-VL2-VH2-VH1-Fc, VH1-VH2-VL2-VL1-Fc, VL1-L1-VL2-L2-VH2-L3-VH1-Fc, VH1-L1-VH2-L2-VL2-L3-VH1-Fc, VL1-L1-VL2-L2-VH2-L3-VH1-L4-Fc, or VH1-L1-VH2-L2-VL2-L3-VL1-L4-Fc, a second polypeptide having a structure represented by VH3-CH1-Fc, and a third polypeptide having a structure represented by VL3-CL. In some aspects, the first polypeptide has a structure represented by VL1-VL2-VH2-VH1-Fc, VH1-VH2-VL2-VL1-Fc, VL1-L1-VL2-L2-VH2-L3-VH1-Fc, VH1-L1-VH2-L2-VL2-L3-VH1-Fc, VL1-L1-VL2-L2-VH2-L3-VH1-L4-Fc, or VH1-L1-VH2-L2-VL2-L3-VL1-L4-Fc, a second polypeptide having a structure represented by VH3-CH1-Fc, and a third polypeptide having a structure represented by VL3-L1-CL. In some aspects, the first polypeptide has a structure represented by VL1-VL2-VH2-VH1-Fc, VH1-VH2-VL2-VL1-Fc, VL1-L1-VL2-L2-VH2-L3-VH1-Fc, VH1-L1-VH2-L2-VL2-L3-VH1-Fc, VL1-L1-VL2-L2-VH2-L3-VH1-L4-Fc, or VH1-L1-VH2-L2-VL2-L3-VL1-L4-Fc, a second polypeptide having a structure represented by VH3-CH1-Fc, and a third polypeptide having a structure represented by VH3-CL. In some aspects, the first polypeptide has a structure represented by VL1-VL2-VH2-VH1-Fc, VH1-VH2-VL2-VL1-Fc, VL1-L1-VL2-L2-VH2-L3-VH1-Fc, VH1-L1-VH2-L2-VL2-L3-VH1-Fc, VL1-L1-VL2-L2-VH2-L3-VH1-L4-Fc, or VH1-L1-VH2-L2-VL2-L3-VL1-L4-Fc, a second polypeptide having a structure represented by VH3-CH1-Fc, and a third polypeptide having a structure represented by VH3-L1-CL. In some aspects, the first polypeptide has a structure represented by VL1-VL2-VH2-VH1-Fc, VH1-VH2-VL2-VL1-Fc, VL1-L1-VL2-L2-VH2-L3-VH1-Fc, VH1-L1-VH2-L2-VL2-L3-VH1-Fc, VL1-L1-VL2-L2-VH2-L3-VH1-L4-Fc, or VH1-L1-VH2-L2-VL2-L3-VL1-L4-Fc, a second polypeptide having a structure represented by VH3-L1-CH1-Fc, and a third polypeptide having a structure represented by VL3-CL. In some aspects, the first polypeptide has a structure represented by VL1-VL2-VH2-VH1-Fc, VH1-VH2-VL2-VL1-Fc, VL1-L1-VL2-L2-VH2-L3-VH1-Fc, VH1-L1-VH2-L2-VL2-L3-VH1-Fc, VL1-L1-VL2-L2-VH2-L3-VH1-L4-Fc, or VH1-L1-VH2-L2-VL2-L3-VL1-L4-Fc, a second polypeptide having a structure represented by VH3-L1-CH1-Fc, and a third polypeptide having a structure represented by VL3-L1-CL. In some aspects, the first polypeptide has a structure represented by VL1-VL2-VH2-VH1-Fc, VH1-VH2-VL2-VL1-Fc, VL1-L1-VL2-L2-VH2-L3-VH1-Fc, VH1-L1-VH2-L2-VL2-L3-VH1-Fc, VL1-L1-VL2-L2-VH2-L3-VH1-L4-Fc, or VH1-L1-VH2-L2-VL2-L3-VL1-L4-Fc, a second polypeptide having a structure represented by VH3-L1-CH1-Fc, and a third polypeptide having a structure represented by VH3-CL. In some aspects, the first polypeptide has a structure represented by VL1-VL2-VH2-VH1-Fc, VH1-VH2-VL2-VL1-Fc, VL1-L1-VL2-L2-VH2-L3-VH1-Fc, VH1-L1-VH2-L2-VL2-L3-VH1-Fc, VL1-L1-VL2-L2-VH2-L3-VH1-L4-Fc, or VH1-L1-VH2-L2-VL2-L3-VL1-L4-Fc, a second polypeptide having a structure represented by VH3-L1-CH1-Fc, and a third polypeptide having a structure represented by VH3-L1-CL. In some aspects, the first polypeptide has a structure represented by VL1-VL2-VH2-VH1-Fc, VH1-VH2-VL2-VL1-Fc, VL1-L1-VL2-L2-VH2-L3-VH1-Fc, VH1-L1-VH2-L2-VL2-L3-VH1-Fc, VL1-L1-VL2-L2-VH2-L3-VH1-L4-Fc, or VH1-L1-VH2-L2-VL2-L3-VL1-L4-Fc, a second polypeptide having a structure represented by VL3-CH1-Fc, and a third polypeptide having a structure represented by VL3-CL. In some aspects, the first polypeptide has a structure represented by VL1-VL2-VH2-VH1-Fc, VH1-VH2-VL2-VL1-Fc, VL1-L1-VL2-L2-VH2-L3-VH1-Fc, VH1-L1-VH2-L2-VL2-L3-VH1-Fc, VL1-L1-VL2-L2-VH2-L3-VH1-L4-Fc, or VH1-L1-VH2-L2-VL2-L3-VL1-L4-Fc, a second polypeptide having a structure represented by VL3-CH1-Fc, and a third polypeptide having a structure represented by VL3-L1-CL. In some aspects, the first polypeptide has a structure represented by VL1-VL2-VH2-VH1-Fc, VH1-VH2-VL2-VL1-Fc, VL1-L1-VL2-L2-VH2-L3-VH1-Fc, VH1-L1-VH2-L2-VL2-L3-VH1-Fc, VL1-L1-VL2-L2-VH2-L3-VH1-L4-Fc, or VH1-L1-VH2-L2-VL2-L3-VL1-L4-Fc, a second polypeptide having a structure represented by VL3-CH1-Fc, and a third polypeptide having a structure represented by VH3-CL. In some aspects, the first polypeptide has a structure represented by VL1-VL2-VH2-VH1-Fc, VH1-VH2-VL2-VL1-Fc, VL1-L1-VL2-L2-VH2-L3-VH1-Fc, VH1-L1-VH2-L2-VL2-L3-VH1-Fc, VL1-L1-VL2-L2-VH2-L3-VH1-L4-Fc, or VH1-L1-VH2-L2-VL2-L3-VL1-L4-Fc, a second polypeptide having a structure represented by VL3-CH1-Fc, and a third polypeptide having a structure represented by VH3-L1-CL. In some aspects, the first polypeptide has a structure represented by VL1-VL2-VH2-VH1-Fc, VH1-VH2-VL2-VL1-Fc, VL1-L1-VL2-L2-VH2-L3-VH1-Fc, VH1-L1-VH2-L2-VL2-L3-VH1-Fc, VL1-L1-VL2-L2-VH2-L3-VH1-L4-Fc, or VH1-L1-VH2-L2-VL2-L3-VL1-L4-Fc, a second polypeptide having a structure represented by VL3-L1-CH1-Fc, and a third polypeptide having a structure represented by VL3-CL. In some aspects, the first polypeptide has a structure represented by VL1-VL2-VH2-VH1-Fc, VH1-VH2-VL2-VL1-Fc, VL1-L1-VL2-L2-VH2-L3-VH1-Fc, VH1-L1-VH2-L2-VL2-L3-VH1-Fc, VL1-L1-VL2-L2-VH2-L3-VH1-L4-Fc, or VH1-L1-VH2-L2-VL2-L3-VL1-L4-Fc, a second polypeptide having a structure represented by VL3-L1-CH1-Fc, and a third polypeptide having a structure represented by VL3-L1-CL. In some aspects, the first polypeptide has a structure represented by VL1-VL2-VH2-VH1-Fc, VH1-VH2-VL2-VL1-Fc, VL1-L1-VL2-L2-VH2-L3-VH1-Fc, VH1-L1-VH2-L2-VL2-L3-VH1-Fc, VL1-L1-VL2-L2-VH2-L3-VH1-L4-Fc, or VH1-L1-VH2-L2-VL2-L3-VL1-L4-Fc, a second polypeptide having a structure represented by VL3-L1-CH1-Fc, and a third polypeptide having a structure represented by VH3-CL. In some aspects, the first polypeptide has a structure represented by VL1-VL2-VH2-VH1-Fc, VH1-VH2-VL2-VL1-Fc, VL1-L1-VL2-L2-VH2-L3-VH1-Fc, VH1-L1-VH2-L2-VL2-L3-VH1-Fc, VL1-L1-VL2-L2-VH2-L3-VH1-L4-Fc, or VH1-L1-VH2-L2-VL2-L3-VL1-L4-Fc, a second polypeptide having a structure represented by VL3-L1-CH1-Fc, and a third polypeptide having a structure represented by VH3-L1-CL. The VL1, VL2, VL3, VH1, VH2, and/or VH3 may specifically bind to A2AR, APRIL, ATPDase, BAFF, BAFFR, BCMA, BlyS, BTK, BTLA, B7DC, B7H1, B7H2, B7H3, B7H4, B7H5, B7H6, B7H7, B7RP1, B7-4, C3, C5, CCL2, CCL3, CCL4, CCL5, CCL7, CCL8, CCLI1, CCL15, CCL17, CCL19, CCL20, CCL21, CCL25 CCR3, CCR4, CD3, CD19, CD20, CD24, CD27, CD28, CD38, CD39, CD40, CD40L, CD47, CD52, CD70, CD80, CD86, CD123, CD133, CD137, CD137L, CD160, CD272, CEACAM5, CLEC9, CLEC91, CRTH2, CSF-1, CSF-2, CSF-3, CXCL1, CXCL2, CXCL4, CXCL12, CXCL13, CXCR3, cMet, CTLA4, DLL3, DNGR-1, E-cadherin, EGFR, ENTPD1, EpCAM, FCER1, FCER1A, FCER2, FGFR, FLAP, FOLH1, Gi24, GITR, GITRL, GPR5, HER2, HER3, ICOSL, ICOS, HHLA2, HMGB1, HVEM, IDO, IFNa, IgE, IGF1R, IL2Rbeta, ILL, IL1A, IL1B, IL1F10, IL2, IL4, IL4Ra, IL5, IL5R, IL6, IL7, IL7Ra, IL8, IL9, IL9R, IL10, rhIL10, IL12, IL13, IL13Ra1, IL13Ra2, IL15, IL17, IL17Rb, IL18, IL22, IL23, IL25, IL7, IL33, IL35, ITGB4, ITK, KIR, LAG3, LAMP1, leptin, LPFS2, MHC class II, MUC-1, MUC-16, NCR3LG1, NKG2D, NKp46, NTPDase-1, OX40, OX40L, PD-1, PD-L1, PD-L2, PROM1, S152, SIRPalpha, SISP1, SLC, SPG64, ST2, STEAP1, STEAP2, Syk kinase, STEAP1, TROP2, TACI, TDO, T14, TIGIT, TIM3, TLR, TLR2, TLR4, TLR5, TLR9, TMEF1, TNFa, TNFRSF7, Tp55, TREM1, TSLP, TSLPR, TWEAK, VEGF, VISTA, Vstm3, WUCAM, DLL4, TGFbeta, GP100, GPRC5D, CD30 or CD16A. For the avoidance of doubt, all the antigen binding polypeptide complex structures described herein can be combined with any one or more of the targets described herein. Any and all disclosure herein in relation to targets for antigen binding polypeptides of the invention is generally applicable, and applies equally and without reservation to each and every antigen binding polypeptide and antigen binding polypeptide complex described herein. For the avoidance of doubt, the VL1, VL2, VL3, VH1, VH2, and/or VH3 of each and every antigen binding polypeptide and antigen binding polypeptide complex described herein may independently bind to any one of said particularly preferred targets.

[0181] In another aspect, the invention is directed to an antigen binding polypeptide complex (e.g., an antibody or antigen binding fragment thereof) comprising a first polypeptide having a structure represented by VL1-VL2-VH2-VH1-Fc, VH1-VH2-VL2-VL1-Fc, VL1-L1-VL2-L2-VH2-L3-VH1-Fc, VH1-L1-VH2-L2-VL2-L3-VH1-Fc, VL1-L1-VL2-L2-VH2-L3-VH1-L4-Fc, or VH1-L1-VH2-L2-VL2-L3-VL1-L4-Fc; and a second polypeptide having a structure represented by CL-VL3-VH3-CH1-Fc, CL-L1-VL3-L2-VH3-L3-CH1-Fc, CL-VH3-VL3-CH1-Fc; CL-L1-VH3-L2-VL3-L3-CH1-Fc, CH1-VL3-VH3-CL-Fc, CH1-L1-VL3-L2-VH3-L3-CL-Fc, CH1-VH3-VL3-CL-Fc; or CH1-L1-VH3-L2-VL3-L3-CL-Fc; wherein VL1 is a first immunoglobulin light chain variable region that specifically binds to A2AR, APRIL, ATPDase, BAFF, BAFFR, BCMA, BlyS, BTK, BTLA, B7DC, B7H1, 1B7112, B7H3, B7H4, B7H5, B7H6, 1B7117, B7RP1, B7-4, C3, C5, CCL2, CCL3, CCL4, CCL5, CCL7, CCL8, CCL11, CCL15, CCL17, CCL19, CCL20, CCL21, CCL25 CCR3, CCR4, CD3, CD19, CD20, CD24, CD27, CD28, CD38, CD39, CD40, CD40L, CD47, CD52, CD70, CD80, CD86, CD123, CD133, CD137, CD137L, CD160, CD272, CEACAM5, CLEC9, CLEC91, CRTH2, CSF-1, CSF-2, CSF-3, CXCL1, CXCL2, CXCL4, CXCL12, CXCL13, CXCR3, cMet, CTLA4, DLL3, DNGR-1, E-cadherin, EGFR, ENTPD1, EpCAM, FCER1, FCER1A, FCER2, FGFR, FLAP, FOLH1, Gi24, GITR, GITRL, GPR5, HER2, HER3, ICOSL, ICOS, HHLA2, HMGB1, HVEM, IDO, IFNa, IgE, IGF1R, IL2Rbeta, IL1, IL1A, IL1B, ILF10, IL2, IL4, IL4Ra, IL5, IL5R, IL6, IL7, IL7Ra, IL8, IL9, IL9R, IL10, rhIL10, IL12, IL13, IL13Ra1, IL13Ra2, IL15, IL17, IL17Rb, IL18, IL22, IL23, IL25, IL7, IL33, IL35, ITGB4, ITK, KIR, LAG3, LAMP1, leptin, LPFS2, MHC class II, MUC-1, MUC-16, NCR3LG1, NKG2D, NKp46, NTPDase-1, OX40, OX40L, PD-1, PD-L1, PD-L2, PROM1, S152, SIRPalpha, SISP1, SLC, SPG64, ST2, STEAP1, STEAP2, Syk kinase, STEAP1, TROP2, TACI, TDO, T14, TIGIT, TIM3, TLR, TLR2, TLR4, TLR5, TLR9, TMEF1, TNFa, TNFRSF7, Tp55, TREM1, TSLP, TSLPR, TWEAK, VEGF, VISTA, Vstm3, WUCAM, DLL4, TGFbeta, GP100, GPRC5D, CD30 or CD16A; VL2 is a second immunoglobulin light chain variable region that specifically binds to A2AR, APRIL, ATPDase, BAFF, BAFFR, BCMA, BlyS, BTK, BTLA, B7DC, B7H1, B7H2, B7H3, B7H4, B7H5, B7H6, B7H7, B7RP1, B7-4, C3, C5, CCL2, CCL3, CCL4, CCL5, CCL7, CCL8, CCL11, CCL15, CCL17, CCL19, CCL20, CCL21, CCL25 CCR3, CCR4, CD3, CD19, CD20, CD24, CD27, CD28, CD38, CD39, CD40, CD40L, CD47, CD52, CD70, CD80, CD86, CD123, CD133, CD137, CD137L, CD160, CD272, CEACAM5, CLEC9, CLEC91, CRTH2, CSF-1, CSF-2, CSF-3, CXCL1, CXCL2, CXCL4, CXCL12, CXCL13, CXCR3, cMet, CTLA4, DLL3, DNGR-1, E-cadherin, EGFR, ENTPD1, EpCAM, FCER1, FCER1A, FCER2, FGFR, FLAP, FOLH1, Gi24, GITR, GITRL, GPR5, HER2, HER3, ICOSL, ICOS, HHLA2, HMGB1, HVEM, IDO, IFNa, IgE, IGF1R, IL2Rbeta, IL1, IL1A, IL1B, IL1F10, IL2, IL4, IL4Ra, IL5, IL5R, IL16, IL7, IL7Ra, IL8, IL9, IL9R, I110, rhIL10, IL12, IL13, IL13Ra1, IL13Ra2, IL15, IL17, IL17Rb, IL18, IL22, IL23, IL25, IL7, 1133, IL35, ITGB4, ITK, KIR, LAG3, LAMP1, leptin, LPFS2, MHC class II, MUC-1, MUC-16, NCR3LG1, NKG2D, NKp46, NTPDase-1, OX40, OX40L, PD-1, PD-L1, PD-L2, PROM1, S1S2, SIRPalpha, SISP1, SLC, SPG64, ST2, STEAP1, STEAP2, Syk kinase, STEAP1, TROP2, TACI, TDO, T14, TIGIT, TIM3, TLR, TLR2, TLR4, TLR5, TLR9, TMEF1, TNFa, TNFRSF7, Tp55, TREM1, TSLP, TSLPR, TWEAK, VEGF, VISTA, Vstm3, WUCAM, DLL4, TGFbeta, GP100, GPRC5D, CD30 or CD16A; VL3 is a third immunoglobulin light chain variable region that specifically binds to A2AR, APRIL, ATPDase, BAFF, BAFFR, BCMA, BlyS, BTK, BTLA, B7DC, B7H1, B7H2, B7H3, B7H4, B7H5, B7H6, B7H7, B7RP1, B7-4, C3, C5, CCL2, CCL3, CCL4, CCL5, CCL7, CCL8, CCL11, CCL15, CCL17, CCL19, CCL20, CCL21, CCL25 CCR3, CCR4, CD3, CD19, CD20, CD24, CD27, CD28, CD38, CD39, CD40, CD40L, CD47, CD52, CD70, CD80, CD86, CD123, CD133, CD137, CD137L, CD160, CD272, CEACAM5, CLEC9, CLEC91, CRTH2, CSF-1, CSF-2, CSF-3, CXCL1, CXCL2, CXCL4, CXCL12, CXCL13, CXCR3, cMet, CTLA4, DLL3, DNGR-1, E-cadherin, EGFR, ENTPD1, EpCAM, FCER1, FCER1A, FCER2, FGFR, FLAP, FOLH1, Gi24, GITR, GITRL, GPR5, HER2, HER3, ICOSL, ICOS, HHLA2, HMGB1, HVEM, IDO, IFNa, IgE, IGF1R, IL2Rbeta, IL1, IL1A, IL1B, IL1F10, IL12, IL14, IL4Ra, IL5, IL5R, IL16, IL17, IL7Ra, 118, 119, IL9R, IL10, rhIL10, IL12, IL13, IL13Ra1, IL13Ra2, IL15, IL17, IL17Rb, IL18, IL22, IL23, IL25, 117, IL33, IL35, ITGB4, ITK, KIR, LAG3, LAMP1, leptin, LPFS2, MHC class II, MUC-1, MUC-16, NCR3LG1, NKG2D, NKp46, NTPDase-1, OX40, OX40L, PD-1, PD-L1, PD-L2, PROM1, S152, SIRPalpha, SISP1, SLC, SPG64, ST2, STEAP1, STEAP2, Syk kinase, STEAP1, TROP2, TACI, TDO, T14, TIGIT, TIM3, TLR, TLR2, TLR4, TLR5, TLR9, TMEF1, TNFa, TNFRSF7, Tp55, TREM1, TSLP, TSLPR, TWEAK, VEGF, VISTA, Vstm3, WUCAM, DLL4, TGFbeta, GP100, GPRC5D, CD30 or CD16A; VH1 is a first immunoglobulin heavy chain variable region that specifically binds to A2AR, APRIL, ATPDase, BAFF, BAFFR, BCMA, BlyS, BTK, BTLA, B7DC, B7H1, B7H2, B7H3, B7H4, B7H5, B7H6, B7H7, B7RP1, B7-4, C3, C5, CCL2, CCL3, CCL4, CCL5, CCL7, CCL8, CCL11, CCL15, CCL17, CCL19, CCL20, CCL21, CCL25 CCR3, CCR4, CD3, CD19, CD20, CD24, CD27, CD28, CD38, CD39, CD40, CD40L, CD47, CD52, CD70, CD80, CD86, CD123, CD133, CD137, CD137L, CD160, CD272, CEACAM5, CLEC9, CLEC91, CRTH2, CSF-1, CSF-2, CSF-3, CXCL1, CXCL2, CXCL4, CXCL12, CXCL13, CXCR3, cMet, CTLA4, DLL3, DNGR-1, E-cadherin, EGFR, ENTPD1, EpCAM, FCER1, FCER1A, FCER2, FGFR, FLAP, FOLH1, Gi24, GITR, GITRL, GPR5, HER2, HER3, ICOSL, ICOS, HHLA2, HMGB1, HVEM, IDO, IFNa, IgE, IGF1R, IL2Rbeta, IL1, IL1A, IL1B, IL1F10, IL2, IL4, IL4Ra, IL5, IL5R, IL6, IL7, IL7Ra, IL8, IL9, IL9R, IL10, rhIL10, IL12, IL13, IL13Ra1, IL13Ra2, IL15, IL17, IL17Rb, IL18, IL22, IL23, IL25, IL7, IL33, IL35, ITGB4, ITK, KIR, LAG3, LAMP1, leptin, LPFS2, MHC class II, MUC-1, MUC-16, NCR3LG1, NKG2D, NKp46, NTPDase-1, OX40, OX40L, PD-1, PD-L1, PD-L2, PROM1, S1S2, SIRPalpha, SISP1, SLC, SPG64, ST2, STEAP1, STEAP2, Syk kinase, STEAP1, TROP2, TACI, TDO, T14, TIGIT, TIM3, TLR, TLR2, TLR4, TLR5, TLR9, TMEF1, TNFa, TNFRSF7, Tp55, TREM1, TSLP, TSLPR, TWEAK, VEGF, VISTA, Vstm3, WUCAM, DLL4, TGFbeta, GP100, GPRC5D, CD30 or CD16A; VH2 is a second immunoglobulin heavy chain variable region that specifically binds to A2AR, APRIL, ATPDase, BAFF, BAFFR, BCMA, BlyS, BTK, BTLA, B7DC, B7H1, B7H2, B7H3, B7H4, B7H5, B7H6, B7H7, B7RP1, B7-4, C3, C5, CCL2, CCL3, CCL4, CCL5, CCL7, CCL8, CCL11, CCL15, CCL17, CCL19, CCL20, CCL21, CCL25 CCR3, CCR4, CD3, CD19, CD20, CD24, CD27, CD28, CD38, CD39, CD40, CD40L, CD47, CD52, CD70, CD80, CD86, CD123, CD133, CD137, CD137L, CD160, CD272, CEACAM5, CLEC9, CLEC91, CRTH2, CSF-1, CSF-2, CSF-3, CXCL1, CXCL2, CXCL4, CXCL12, CXCL13, CXCR3, cMet, CTLA4, DLL3, DNGR-1, E-cadherin, EGFR, ENTPD1, EpCAM, FCER1, FCER1A, FCER2, FGFR, FLAP, FOLH1, Gi24, GITR, GITRL, GPR5, HER2, HER3, ICOSL, ICOS, HHLA2, HMGB1, HVEM, IDO, IFNa, IgE, IGF1R, IL2Rbeta, IL1, IL1A, IL1B, IL1F10, IL2, IL4, IL4Ra, IL5, IL5R, IL6, IL7, IL7Ra, IL8, IL9, IL9R, IL10, rhIL10, IL12, IL13, IL13Ra1, IL13Ra2, IL15, IL17, IL17Rb, IL18, IL22, IL23, IL25, IL7, IL33, IL35, ITGB4, ITK, KIR, LAG3, LAMP1, leptin, LPFS2, MHC class II, MUC-1, MUC-16, NCR3LG1, NKG2D, NKp46, NTPDase-1, OX40, OX40L, PD-1, PD-L1, PD-L2, PROM1, S152, SIRPalpha, SISP1, SLC, SPG64, ST2, STEAP1, STEAP2, Syk kinase, STEAP1, TROP2, TACI, TDO, T14, TIGIT, TIM3, TLR, TLR2, TLR4, TLR5, TLR9, TMEF1, TNFa, TNFRSF7, Tp55, TREM1, TSLP, TSLPR, TWEAK, VEGF, VISTA, Vstm3, WUCAM, DLL4, TGFbeta, GP100, GPRC5D, CD30 or CD16A; VH3 is a third immunoglobulin heavy chain variable region that specifically binds to A2AR, APRIL, ATPDase, BAFF, BAFFR, BCMA, BlyS, BTK, BTLA, B7DC, B7H1, B7H2, B7H3, B7H4, B7H5, B7H6, B7H7, B7RP1, B7-4, C3, C5, CCL2, CCL3, CCL4, CCL5, CCL7, CCL8, CCL11, CCL15, CCL17, CCL19, CCL20, CCL21, CCL25 CCR3, CCR4, CD3, CD19, CD20, CD24, CD27, CD28, CD38, CD39, CD40, CD40L, CD47, CD52, CD70, CD80, CD86, CD123, CD133, CD137, CD137L, CD160, CD272, CEACAM5, CLEC9, CLEC91, CRTH2, CSF-1, CSF-2, CSF-3, CXCL1, CXCL2, CXCL4, CXCL12, CXCL13, CXCR3, cMet, CTLA4, DLL3, DNGR-1, E-cadherin, EGFR, ENTPD1, EpCAM, FCER1, FCER1A, FCER2, FGFR, FLAP, FOLH1, Gi24, GITR, GITRL, GPR5, HER2, HER3, ICOSL, ICOS, HHLA2, HMGB1, HVEM, IDO, IFNa, IgE, IGF1R, IL2Rbeta, IL1, IL1A, IL1B, IL1F10, IL2, IL4, IL4Ra, IL5, IL5R, IL6, IL7, IL7Ra, IL8, IL9, IL9R, IL10, rhIL10, IL12, IL13, IL13Ra1, IL13Ra2, IL15, IL17, IL17Rb, IL18, IL22, IL23, IL25, IL7, IL33, IL35, ITGB4, ITK, KIR, LAG3, LAMP1, leptin, LPFS2, MHC class II, MUC-1, MUC-16, NCR3LG1, NKG2D, NKp46, NTPDase-1, OX40, OX40L, PD-1, PD-L1, PD-L2, PROM1, S1S2, SIRPalpha, SISP1, SLC, SPG64, ST2, STEAP1, STEAP2, Syk kinase, STEAP1, TROP2, TACI, TDO, T14, TIGIT, TIM3, TLR, TLR2, TLR4, TLR5, TLR9, TMEF1, TNFa, TNFRSF7, Tp55, TREM1, TSLP, TSLPR, TWEAK, VEGF, VISTA, Vstm3, WUCAM, DLL4, TGFbeta, GP100, GPRC5D, CD30 or CD16A; Fc is a region comprising an immunoglobulin heavy chain constant region 2 (CH2), an immunoglobulin heavy chain constant region 3 (CH3), and optionally, an immunoglobulin hinge; CH1 is an immunoglobulin heavy chain constant region 1; CL is an immunoglobulin light chain constant region; and L1, L2, L3 and L4 are amino acid linkers. In some aspects, VH1 and VL1 specifically bind to CD3, VH2 and VL2 specifically bind to CD28, and VH3 and VL3 specifically bind to CD38. In another aspect, VH1 and VL1 specifically bind to CD3, VH2 and VL2 specifically bind to CD28, and VH3 and VL3 specifically bind to CD19. In another aspect, VH1 and VL1 specifically bind to CD28, VH2 and VL2 specifically bind to CD3, and VH3 and VL3 specifically bind to CD38. In another aspect, VH1 and VL1 specifically bind to CD28, VH2 and VL2 specifically bind to CD3, and VH3 and VL3 specifically bind to CD19. In some aspects, the first polypeptide has a structure represented by VL1-VL2-VH2-VH1-Fec, VH1-VH2-VL2-VL1-Fc, VL1-L1-VL2-L2-VH2-L3-VH1-Fc, VH1-L1-VH2-L2-VL2-L3-VH1-Fc, VL1-L1-VL2-L2-VH2-L3-VH1-L4-Fc, or VH1-L1-VH2-L2-VL2-L3-VL1-L4-Fc and a second polypeptide having a structure represented by CL-VL3-VH3-CH1-Fc. In some aspects, the first polypeptide has a structure represented by VL1-VL2-VH2-VH1-Fc, VH1-VH2-VL2-VL1-Fc, VL1-L1-VL2-L2-VH2-L3-VH1-Fc, VH1-L1-VH2-L2-VL2-L3-VH1-Fc, VL1-L1-VL2-L2-VH2-L3-VH1-L4-Fc, or VH1-L1-VH2-L2-VL2-L3-VL1-L4-Fc and a second polypeptide having a structure represented by CL-L1-VL3-L2-VH3-L3-CH1-Fc. In some aspects, the first polypeptide has a structure represented by VL1-VL2-VH2-VH1-Fc, VH1-VH2-VL2-VL1-Fc, VL1-L1-VL2-L2-VH2-L3-VH1-Fc, VH1-L1-VH2-L2-VL2-L3-VH1-Fc, VL1-L1-VL2-L2-VH2-L3-VH1-L4-Fc, or VH1-L1-VH2-L2-VL2-L3-VL1-L4-Fc and a second polypeptide having a structure represented by CL-VH3-VL3-CH1-Fc. In some aspects, the first polypeptide has a structure represented by VL1-VL2-VH2-VH1-Fc, VH1-VH2-VL2-VL1-Fc, VL1-L1-VL2-L2-VH2-L3-VH1-Fc, VH1-L1-VH2-L2-VL2-L3-VH1-Fc, VL1-L1-VL2-L2-VH2-L3-VH1-L4-Fc, or VH1-L1-VH2-L2-VL2-L3-VL1-L4-Fc and a second polypeptide having a structure represented by CL-L1-VH3-L2-VL3-L3-CH1-Fc. In some aspects, the first polypeptide has a structure represented by VL1-VL2-VH2-VH1-Fc, VH1-VH2-VL2-VL1-Fc, VL1-L1-VL2-L2-VH2-L3-VH1-Fc, VH1-L1-VH2-L2-VL2-L3-VH1-Fc, VL1-L1-VL2-L2-VH2-L3-VH1-L4-Fc, or VH1-L1-VH2-L2-VL2-L3-VL1-L4-Fc and a second polypeptide having a structure represented by CH1-VL3-VH3-CL-Fc. In some aspects, the first polypeptide has a structure represented by VL1-VL2-VH2-VH1-Fc, VH1-VH2-VL2-VL1-Fc, VL1-L1-VL2-L2-VH2-L3-VH1-Fc, VH1-L1-VH2-L2-VL2-L3-VH1-Fc, VL1-L1-VL2-L2-VH2-L3-VH1-L4-Fc, or VH1-L1-VH2-L2-VL2-L3-VL1-L4-Fc and a second polypeptide having a structure represented by CH1-L1-VL3-L2-VH3-L3-CL-Fc. In some aspects, the first polypeptide has a structure represented by VL1-VL2-VH2-VH1-Fc, VH1-VH2-VL2-VL1-Fc, VL1-L1-VL2-L2-VH2-L3-VH1-Fc, VH1-L1-VH2-L2-VL2-L3-VH1-Fc, VL1-L1-VL2-L2-VH2-L3-VH1-L4-Fc, or VH1-L1-VH2-L2-VL2-L3-VL1-L4-Fc and a second polypeptide having a structure represented by CH1-VH3-VL3-CL-Fc. In some aspects, the first polypeptide has a structure represented by VL1-VL2-VH2-VH1-Fc, VH1-VH2-VL2-VL1-Fc, VL1-L1-VL2-L2-VH2-L3-VH1-Fc, VH1-L1-VH2-L2-VL2-L3-VH1-Fc, VL1-L1-VL2-L2-VH2-L3-VH1-L4-Fc, or VH1-L1-VH2-L2-VL2-L3-VL1-L4-Fc and a second polypeptide having a structure represented by CH1-L1-VH3-L2-VL3-L3-CL-Fe. The VL1, VL2, VL3, VH1, VH2, and/or VH3 may specifically bind to A2AR, APRIL, ATPDase, BAFF, BAFFR, BCMA, BlyS, BTK, BTLA, B7DC, B7H1, B7H2, B7H3, B7H4, B7H5, B7H6, B7H7, B7RP1, B7-4, C3, C5, CCL2, CCL3, CCL4, CCL5, CCL7, CCL8, CCL11, CCL15, CCL17, CCL19, CCL20, CCL21, CCL25 CCR3, CCR4, CD3, CD19, CD20, CD24, CD27, CD28, CD38, CD39, CD40, CD40L, CD47, CD52, CD70, CD80, CD86, CD123, CD133, CD137, CD137L, CD160, CD272, CEACAM5, CLEC9, CLEC91, CRTH2, CSF-1, CSF-2, CSF-3, CXCL1, CXCL2, CXCL4, CXCL12, CXCL13, CXCR3, cMet, CTLA4, DLL3, DNGR-1, E-cadherin, EGFR, ENTPD1, EpCAM, FCER1, FCER1A, FCER2, FGFR, FLAP, FOLH1, Gi24, GITR, GITRL, GPR5, HER2, HER3, ICOSL, ICOS, HHLA2, HMGB1, HVEM, IDO, IFNa, IgE, IGF1R, IL2Rbeta, IL1, IL1A, IL1B, IL1F10, IL2, IL4, IL4Ra, IL5, IL5R, IL6, IL7, IL7Ra, IL8, IL9, IL9R, 110, rhIL10, IL12, IL13, IL13Ra1, IL13Ra2, IL15, 117, IL17Rb, IL18, IL22, IL23, IL25, IL7, IL33, IL35, ITGB4, ITK, KIR, LAG3, LAMP1, leptin, LPFS2, MHC class II, MUC-1, MUC-16, NCR3LG1, NKG2D, NKp46, NTPDase-1, OX40, OX40L, PD-1, PD-L1, PD-L2, PROM1, S152, SIRPalpha, SISP1, SLC, SPG64, ST2, STEAP1, STEAP2, Syk kinase, STEAP1, TROP2, TACI, TDO, T14, TIGIT, TIM3, TLR, TLR2, TLR4, TLR5, TLR9, TMEF1, TNFa, TNFRSF7, Tp55, TREM1, TSLP, TSLPR, TWEAK, VEGF, VISTA, Vstm3, WUCAM, DLL4, TGFbeta, GP100, GPRC5D, CD30 or CD16A. For the avoidance of doubt, all the antigen binding polypeptide complex structures described herein can be combined with any one or more of the targets described herein. Any and all disclosure herein in relation to targets for antigen binding polypeptides of the invention is generally applicable, and applies equally and without reservation to each and every antigen binding polypeptide and antigen binding polypeptide complex described herein. For the avoidance of doubt, the VL1, VL2, VL3, VH1, VH2, and/or VH3 of each and every antigen binding polypeptide and antigen binding polypeptide complex described herein may independently bind to any one of said particularly preferred targets.

[0182] In another aspect, the invention is directed to an antigen binding polypeptide complex (e.g., an antibody or antigen binding fragment thereof) comprising a first polypeptide having a structure represented by VL1-VL2-VH2-VH1-Fc, VH1-VH2-VL2-VL1-Fc, VL1-L1-VL2-L2-VH2-L3-VH1-Fc, VH1-L1-VH2-L2-VL2-L3-VH1-Fc, VL1-L1-VL2-L2-VH2-L3-VH1-L4-Fc, or VH1-L1-VH2-L2-VL2-L3-VL1-L4-Fc; and a second polypeptide having a structure represented by VL3-CL-VH3-CH1-Fc, VL3-L1-CL-L2-VH3-L3-CH1-Fc, VH3-CL-VL3-CH1-Fc, VH3-L1-CL-L2-VL3-L3-CH1-Fc, VL3-CH1-VH3-CL-Fc, VL3-L1-CH1-L2-VH3-L3-CL-Fc, VH3-CH1-VL3-CL-Fc, or VH3-L1-CH1-L2-VL3-L3-CL-Fc; wherein VL1 is a first immunoglobulin light chain variable region that specifically binds to A2AR, APRIL, ATPDase, BAFF, BAFFR, BCMA, BlyS, BTK, BTLA, B7DC, B7H1, B7H2, B7H3, B7H4, B7H5, B7H6, B7H7, B7RP1, B7-4, C3, C5, CCL2, CCL3, CCL4, CCL5, CCL7, CCL8, CCL11, CCL15, CCL17, CCL19, CCL20, CCL21, CCL25 CCR3, CCR4, CD3, CD19, CD20, CD24, CD27, CD28, CD38, CD39, CD40, CD40L, CD47, CD52, CD70, CD80, CD86, CD123, CD133, CD137, CD137L, CD160, CD272, CEACAM5, CLEC9, CLEC91, CRTH2, CSF-1, CSF-2, CSF-3, CXCL1, CXCL2, CXCL4, CXCL12, CXCL13, CXCR3, cMet, CTLA4, DLL3, DNGR-1, E-cadherin, EGFR, ENTPD1, EpCAM, FCER1, FCER1A, FCER2, FGFR, FLAP, FOLH1, Gi24, GITR, GITRL, GPR5, HER2, HER3, ICOSL, ICOS, HHLA2, HMGB1, HVEM, IDO, IFNa, IgE, IGF1R, IL2Rbeta, IL1, IL1A, IL1B, ILF10, IL2, IL4, IL4Ra, IL5, IL5R, IL6, IL7, IL7Ra, IL8, IL9, IL9R, IL10, rhIL10, IL12, IL13, IL13Ra1, IL13Ra2, IL15, IL17, IL17Rb, IL18, IL22, IL23, IL25, IL7, IL33, IL35, ITGB4, ITK, KIR, LAG3, LAMP1, leptin, LPFS2, MHC class II, MUC-1, MUC-16, NCR3LG1, NKG2D, NKp46, NTPDase-1, OX40, OX40L, PD-1, PD-L1, PD-L2, PROM1, S152, SIRPalpha, SISP1, SLC, SPG64, ST2, STEAP1, STEAP2, Syk kinase, STEAP1, TROP2, TACI, TDO, T14, TIGIT, TIM3, TLR, TLR2, TLR4, TLR5, TLR9, TMEF1, TNFa, TNFRSF7, Tp55, TREM1, TSLP, TSLPR, TWEAK, VEGF, VISTA, Vstm3, WUCAM, DLL4, TGFbeta, GP100, GPRC5D, CD30 or CD16A; VL2 is a second immunoglobulin light chain variable region that specifically binds to A2AR, APRIL, ATPDase, BAFF, BAFFR, BCMA, BlyS, BTK, BTLA, B7DC, B7H1, B7H2, B7H3, B7H4, B7H5, B7H6, B7H7, B7RP1, B7-4, C3, C5, CCL2, CCL3, CCL4, CCL5, CCL7, CCL8, CCL11, CCL15, CCL17, CCL19, CCL20, CCL21, CCL25 CCR3, CCR4, CD3, CD19, CD20, CD24, CD27, CD28, CD38, CD39, CD40, CD40L, CD47, CD52, CD70, CD80, CD86, CD123, CD133, CD137, CD137L, CD160, CD272, CEACAM5, CLEC9, CLEC91, CRTH2, CSF-1, CSF-2, CSF-3, CXCL1, CXCL2, CXCL4, CXCL12, CXCL13, CXCR3, cMet, CTLA4, DLL3, DNGR-1, E-cadherin, EGFR, ENTPD1, EpCAM, FCER1, FCER1A, FCER2, FGFR, FLAP, FOLH1, Gi24, GITR, GITRL, GPR5, HER2, HER3, ICOSL, ICOS, HHLA2, HMGB1, HVEM, IDO, IFNa, IgE, IGF1R, IL2Rbeta, IL1, IL1A, IL1B, IL1F10, IL2, IL4, IL4Ra, IL5, IL5R, IL16, IL7, IL7Ra, IL8, IL9, IL9R, I110, rhIL10, IL12, IL13, IL13Ra1, IL13Ra2, IL15, IL17, IL17Rb, IL18, IL22, IL23, IL25, 117, 1133, IL35, ITGB4, ITK, KIR, LAG3, LAMP1, leptin, LPFS2, MHC class II, MUC-1, MUC-16, NCR3LG1, NKG2D, NKp46, NTPDase-1, OX40, OX40L, PD-1, PD-L1, PD-L2, PROM1, S152, SIRPalpha, SISP1, SLC, SPG64, ST2, STEAP1, STEAP2, Syk kinase, STEAP1, TROP2, TACI, TDO, T14, TIGIT, TIM3, TLR, TLR2, TLR4, TLR5, TLR9, TMEF1, TNFa, TNFRSF7, Tp55, TREM1, TSLP, TSLPR, TWEAK, VEGF, VISTA, Vstm3, WUCAM, DLL4, TGFbeta, GP100, GPRC5D, CD30 or CD16A; VL3 is a third immunoglobulin light chain variable region that specifically binds to A2AR, APRIL, ATPDase, BAFF, BAFFR, BCMA, BlyS, BTK, BTLA, B7DC, B7H1, B7H2, B7H3, B7H4, B7H5, B7H6, B7H7, B7RP1, B7-4, C3, C5, CCL2, CCL3, CCL4, CCL5, CCL7, CCL8, CCL11, CCL15, CCL17, CCL19, CCL20, CCL21, CCL25 CCR3, CCR4, CD3, CD19, CD20, CD24, CD27, CD28, CD38, CD39, CD40, CD40L, CD47, CD52, CD70, CD80, CD86, CD123, CD133, CD137, CD137L, CD160, CD272, CEACAM5, CLEC9, CLEC91, CRTH2, CSF-1, CSF-2, CSF-3, CXCL1, CXCL2, CXCL4, CXCL12, CXCL13, CXCR3, cMet, CTLA4, DLL3, DNGR-1, E-cadherin, EGFR, ENTPD1, EpCAM, FCER1, FCER1A, FCER2, FGFR, FLAP, FOLH1, Gi24, GITR, GITRL, GPR5, HER2, HER3, ICOSL, ICOS, HHLA2, HMGB1, HVEM, IDO, IFNa, IgE, IGF1R, IL2Rbeta, IL1, IL1A, IL1B, IL1F10, IL12, IL14, I14Ra, IL5, IL5R, IL16, 117, IL7Ra, IL8, 119, IL9R, IL10, rhIL10, IL12, IL13, IL13Ra1, IL13Ra2, IL15, IL17, IL17Rb, IL18, IL22, IL23, IL25, 117, IL33, IL35, ITGB4, ITK, KIR, LAG3, LAMP1, leptin, LPFS2, MHC class II, MUC-1, MUC-16, NCR3LG1, NKG2D, NKp46, NTPDase-1, OX40, OX40L, PD-1, PD-L1, PD-L2, PROM1, S152, SIRPalpha, SISP1, SLC, SPG64, ST2, STEAP1, STEAP2, Syk kinase, STEAP1, TROP2, TACI, TDO, T14, TIGIT, TIM3, TLR, TLR2, TLR4, TLRS, TLR9, TMEF1, TNFa, TNFRSF7, Tp55, TREM1, TSLP, TSLPR, TWEAK, VEGF, VISTA, Vstm3, WUCAM, DLL4, TGFbeta, GP100, GPRC5D, CD30 or CD16A; VH1 is a first immunoglobulin heavy chain variable region that specifically binds to A2AR, APRIL, ATPDase, BAFF, BAFFR, BCMA, BlyS, BTK, BTLA, B7DC, B7H1, B7H2, B7H3, B7H4, B7H5, B7H6, B7H7, B7RP1, B7-4, C3, C5, CCL2, CCL3, CCL4, CCL5, CCL7, CCL8, CCL11, CCL15, CCL17, CCL19, CCL20, CCL21, CCL25 CCR3, CCR4, CD3, CD19, CD20, CD24, CD27, CD28, CD38, CD39, CD40, CD40L, CD47, CD52, CD70, CD80, CD86, CD123, CD133, CD137, CD137L, CD160, CD272, CEACAM5, CLEC9, CLEC91, CRTH2, CSF-1, CSF-2, CSF-3, CXCL1, CXCL2, CXCL4, CXCL12, CXCL13, CXCR3, cMet, CTLA4, DLL3, DNGR-1, E-cadherin, EGFR, ENTPD1, EpCAM, FCER1, FCER1A, FCER2, FGFR, FLAP, FOLH1, Gi24, GITR, GITRL, GPR5, HER2, HER3, ICOSL, ICOS, HHLA2, HMGB1, HVEM, IDO, IFNa, IgE, IGF1R, IL2Rbeta, IL1, IL1A, IL1B, IL1F10, IL2, IL4, IL4Ra, IL5, IL5R, IL6, IL7, IL7Ra, IL8, IL9, IL9R, IL10, rhIL10, IL12, IL13, IL13Ra1, IL13Ra2, IL15, IL17, IL17Rb, IL18, IL22, IL23, IL25, IL7, IL33, IL35, ITGB4, ITK, KIR, LAG3, LAMP1, leptin, LPFS2, MHC class II, MUC-1, MUC-16, NCR3LG1, NKG2D, NKp46, NTPDase-1, OX40, OX40L, PD-1, PD-L1, PD-L2, PROM1, S152, SIRPalpha, SISP1, SLC, SPG64, ST2, STEAP1, STEAP2, Syk kinase, STEAP1, TROP2, TACI, TDO, T14, TIGIT, TIM3, TLR, TLR2, TLR4, TLR5, TLR9, TMEF1, TNFa, TNFRSF7, Tp55, TREM1, TSLP, TSLPR, TWEAK, VEGF, VISTA, Vstm3, WUCAM, DLL4, TGFbeta, GP100, GPRC5D, CD30 or CD16A; VH2 is a second immunoglobulin heavy chain variable region that specifically binds to A2AR, APRIL, ATPDase, BAFF, BAFFR, BCMA, BlyS, BTK, BTLA, B7DC, B7H1, B7H2, B7H3, B7H4, B7H5, B7H6, B7H7, B7RP1, B7-4, C3, C5, CCL2, CCL3, CCL4, CCL5, CCL7, CCL8, CCL11, CCL15, CCL17, CCL19, CCL20, CCL21, CCL25 CCR3, CCR4, CD3, CD19, CD20, CD24, CD27, CD28, CD38, CD39, CD40, CD40L, CD47, CD52, CD70, CD80, CD86, CD123, CD133, CD137, CD137L, CD160, CD272, CEACAM5, CLEC9, CLEC91, CRTH2, CSF-1, CSF-2, CSF-3, CXCL1, CXCL2, CXCL4, CXCL12, CXCL13, CXCR3, cMet, CTLA4, DLL3, DNGR-1, E-cadherin, EGFR, ENTPD1, EpCAM, FCER1, FCER1A, FCER2, FGFR, FLAP, FOLH1, Gi24, GITR, GITRL, GPR5, HER2, HER3, ICOSL, ICOS, HHLA2, HMGB1, HVEM, IDO, IFNa, IgE, IGF1R, IL2Rbeta, IL1, IL1A, IL1B, IL1F10, IL2, IL4, IL4Ra, IL5, IL5R, IL6, IL7, IL7Ra, IL8, IL9, IL9R, IL10, rhIL10, IL12, IL13, R13Ra1, IL13Ra2, IL15, IL17, IL17Rb, IL18, IL22, IL23, IL25, IL7, IL33, IL35, ITGB4, ITK, KIR, LAG3, LAMP1, leptin, LPFS2, MHC class II, MUC-1, MUC-16, NCR3LG1, NKG2D, NKp46, NTPDase-1, OX40, OX40L, PD-1, PD-L1, PD-L2, PROM1, S152, SIRPalpha, SISP1, SLC, SPG64, ST2, STEAP1, STEAP2, Syk kinase, STEAP1, TROP2, TACI, TDO, T14, TIGIT, TIM3, TLR, TLR2, TLR4, TLR5, TLR9, TMEF1, TNFa, TNFRSF7, Tp55, TREM1, TSLP, TSLPR, TWEAK, VEGF, VISTA, Vstm3, WUCAM, DLL4, TGFbeta, GP100, GPRC5D, CD30 or CD16A; VH3 is a third immunoglobulin heavy chain variable region that specifically binds to A2AR, APRIL, ATPDase, BAFF, BAFFR, BCMA, BlyS, BTK, BTLA, B7DC, B7H1, B7H2, B7H3, B7H4, B7H5, B7H6, B7H7, B7RP1, B7-4, C3, C5, CCL2, CCL3, CCL4, CCL5, CCL7, CCL8, CCL11, CCL15, CCL17, CCL19, CCL20, CCL21, CCL25 CCR3, CCR4, CD3, CD19, CD20, CD24, CD27, CD28, CD38, CD39, CD40, CD40L, CD47, CD52, CD70, CD80, CD86, CD123, CD133, CD137, CD137L, CD160, CD272, CEACAM5, CLEC9, CLEC91, CRTH2, CSF-1, CSF-2, CSF-3, CXCL1, CXCL2, CXCL4, CXCL12, CXCL13, CXCR3, cMet, CTLA4, DLL3, DNGR-1, E-cadherin, EGFR, ENTPD1, EpCAM, FCER1, FCER1A, FCER2, FGFR, FLAP, FOLH1, Gi24, GITR, GITRL, GPR5, HER2, HER3, ICOSL, ICOS, HHLA2, HMGB1, HVEM, IDO, IFNa, IgE, IGF1R, I2Rbeta, IL1, IL1A, IL1B, IL1F10, IL2, IL4, IL4Ra, IL5, IL5R, IL6, IL7, IL7Ra, IL8, IL9, IL9R, IL10, rhIL10, IL12, IL13, IL13Ra1, IL13Ra2, IL15, IL17, IL17Rb, IL18, IL22, IL23, IL25, IL7, IL33, IL35, ITGB4, ITK, KIR, LAG3, LAMP1, leptin, LPFS2, MHC class II, MUC-1, MUC-16, NCR3LG1, NKG2D, NKp46, NTPDase-1, OX40, OX40L, PD-1, PD-L1, PD-L2, PROM1, S152, SIRPalpha, SISP1, SLC, SPG64, ST2, STEAP1, STEAP2, Syk kinase, STEAP1, TROP2, TACI, TDO, T14, TIGIT, TIM3, TLR, TLR2, TLR4, TLR5, TLR9, TMEF1, TNFa, TNFRSF7, Tp55, TREM1, TSLP, TSLPR, TWEAK, VEGF, VISTA, Vstm3, WUCAM, DLL4, TGFbeta, GP100, GPRC5D, CD30 or CD16A; Fc is a region comprising an immunoglobulin heavy chain constant region 2 (CH2), an immunoglobulin heavy chain constant region 3 (CH3), and optionally, an immunoglobulin hinge; CH1 is an immunoglobulin heavy chain constant region 1; CL is an immunoglobulin light chain constant region; and L1, L2, L3 and L4 are amino acid linkers. In some aspects, VH1 and VL1 specifically bind to CD3, VH2 and VL2 specifically bind to CD28, and VH3 and VL3 specifically bind to CD38. In another aspect, VH1 and VL1 specifically bind to CD3, VH2 and VL2 specifically bind to CD28, and VH3 and VL3 specifically bind to CD19. In another aspect, VH1 and VL1 specifically bind to CD28, VH2 and VL2 specifically bind to CD3, and VH3 and VL3 specifically bind to CD38. In another aspect, VH1 and VL1 specifically bind to CD28, VH2 and VL2 specifically bind to CD3, and VH3 and VL3 specifically bind to CD19. In some aspects, the first polypeptide has a structure represented by VL1-VL2-VH2-VH1-Fc, VH1-VH2-VL2-VL1-Fc, VL1-L1-VL2-L2-VH2-L3-VH1-Fc, VH1-L1-VH2-L2-VL2-L3-VH1-Fc, VL1-L1-VL2-L2-VH2-L3-VH1-L4-Fc, or VH1-L1-VH2-L2-VL2-L3-VL1-L4-Fc and a second polypeptide having a structure represented by VL3-CL-VH3-CH1-Fc. In some aspects, the first polypeptide has a structure represented by VL1-VL2-VH2-VH1-Fc, VH1-VH2-VL2-VL1-Fc, VL1-L1-VL2-L2-VH2-L3-VH1-Fc, VH1-L1-VH2-L2-VL2-L3-VH1-Fc, VL1-L1-VL2-L2-VH2-L3-VH1-L4-Fc, or VH1-L1-VH2-L2-VL2-L3-VL1-L4-Fc and a second polypeptide having a structure represented by VL3-L1-CL-L2-VH3-L3-CH1-Fc. In some aspects, the first polypeptide has a structure represented by VL1-VL2-VH2-VH1-Fc, VH1-VH2-VL2-VL1-Fc, VL1-L1-VL2-L2-VH2-L3-VH1-Fc, VH1-L1-VH2-L2-VL2-L3-VH1-Fc, VL1-L1-VL2-L2-VH2-L3-VH1-L4-Fc, or VH1-L1-VH2-L2-VL2-L3-VL1-L4-Fc and a second polypeptide having a structure represented by VH3-CL-VL3-CH1-Fc. In some aspects, the first polypeptide has a structure represented by VL1-VL2-VH2-VH1-Fc, VH1-VH2-VL2-VL1-Fc, VL1-L1-VL2-L2-VH2-L3-VH1-Fc, VH1-L1-VH2-L2-VL2-L3-VH1-Fc, VL1-L1-VL2-L2-VH2-L3-VH1-L4-Fc, or VH1-L1-VH2-L2-VL2-L3-VL1-L4-Fc and a second polypeptide having a structure represented by VH3-L1-CL-L2-VL3-L3-CH1-Fc. In some aspects, the first polypeptide has a structure represented by VL1-VL2-VH2-VH1-Fc, VH1-VH2-VL2-VL1-Fc, VL1-L1-VL2-L2-VH2-L3-VH1-Fc, VH1-L1-VH2-L2-VL2-L3-VH1-Fc, VL1-L1-VL2-L2-VH2-L3-VH1-L4-Fc, or VH1-L1-VH2-L2-VL2-L3-VL1-L4-Fc and a second polypeptide having a structure represented by VL3-CH1-VH3-CL-Fc. In some aspects, the first polypeptide has a structure represented by VL1-VL2-VH2-VH1-Fc, VH1-VH2-VL2-VL1-Fc, VL1-L1-VL2-L2-VH2-L3-VH1-Fc, VH1-L1-VH2-L2-VL2-L3-VH1-Fc, VL1-L1-VL2-L2-VH2-L3-VH1-L4-Fc, or VH1-L1-VH2-L2-VL2-L3-VL1-L4-Fc and a second polypeptide having a structure represented by VL3-L1-CH1-L2-VH3-L3-CL-Fc. In some aspects, the first polypeptide has a structure represented by VL1-VL2-VH2-VH1-Fc, VH1-VH2-VL2-VL1-Fc, VL1-L1-VL2-L2-VH2-L3-VH1-Fc, VH1-L1-VH2-L2-VL2-L3-VH1-Fc, VL1-L1-VL2-L2-VH2-L3-VH1-L4-Fc, or VH1-L1-VH2-L2-VL2-L3-VL1-L4-Fc and a second polypeptide having a structure represented by VH3-CH1-VL3-CL-Fc. In some aspects, the first polypeptide has a structure represented by VL1-VL2-VH2-VH1-Fc, VH1-VH2-VL2-VL1-Fc, VL1-L1-VL2-L2-VH2-L3-VH1-Fc, VH1-L1-VH2-L2-VL2-L3-VH1-Fc, VL1-L1-VL2-L2-VH2-L3-VH1-L4-Fc, or VH1-L1-VH2-L2-VL2-L3-VL1-L4-Fc and a second polypeptide having a structure represented by VH3-L1-CH1-L2-VL3-L3-CL-Fc. The VL1, VL2, VL3, VH1, VH2, and/or VH3 may specifically bind to A2AR, APRIL, ATPDase, BAFF, BAFFR, BCMA, BlyS, BTK, BTLA, B7DC, B7H1, B7H2, B7H3, B7H4, B7H5, B7H6, B7H7, B7RP1, B7-4, C3, C5, CCL2, CCL3, CCL4, CCL5, CCL7, CCL8, CCL11, CCL15, CCL17, CCL19, CCL20, CCL21, CCL25 CCR3, CCR4, CD3, CD19, CD20, CD24, CD27, CD28, CD38, CD39, CD40, CD40L, CD47, CD52, CD70, CD80, CD86, CD123, CD133, CD137, CD137L, CD160, CD272, CEACAM5, CLEC9, CLEC91, CRTH2, CSF-1, CSF-2, CSF-3, CXCL1, CXCL2, CXCL4, CXCL12, CXCL13, CXCR3, cMet, CTLA4, DLL3, DNGR-1, E-cadherin, EGFR, ENTPD1, EpCAM, FCER1, FCER1A, FCER2, FGFR, FLAP, FOLH1, Gi24, GITR, GITRL, GPR5, HER2, HER3, ICOSL, ICOS, HHLA2, HMGB1, HVEM, IDO, IFNa, IgE, IGF1R, IL2Rbeta, IL1, IL1A, IL1B, IL1F10, IL2, IL4, IL4Ra, IL5, IL5R, IL6, IL7, IL7Ra, IL8, IL9, IL9R, 110, rhIL10, IL12, IL13, IL13Ra1, IL13Ra2, IL15, 117, IL17Rb, IL18, IL22, IL23, IL25, IL7, IL33, IL35, ITGB4, ITK, KIR, LAG3, LAMP1, leptin, LPFS2, MHC class II, MUC-1, MUC-16, NCR3LG1, NKG2D, NKp46, NTPDase-1, OX40, OX40L, PD-1, PD-L1, PD-L2, PROM1, S1S2, SIRPalpha, SISP1, SLC, SPG64, ST2, STEAP1, STEAP2, Syk kinase, STEAP1, TROP2, TACI, TDO, T14, TIGIT, TIM3, TLR, TLR2, TLR4, TLR5, TLR9, TMEF1, TNFa, TNFRSF7, Tp55, TREM1, TSLP, TSLPR, TWEAK, VEGF, VISTA, Vstm3, WUCAM, DLL4, TGFbeta, GP100, GPRC5D, CD30 or CD16A. For the avoidance of doubt, all the antigen binding polypeptide complex structures described herein can be combined with any one or more of the targets described herein. Any and all disclosure herein in relation to targets for antigen binding polypeptides of the invention is generally applicable, and applies equally and without reservation to each and every antigen binding polypeptide and antigen binding polypeptide complex described herein. For the avoidance of doubt, the VL1, VL2, VL3, VH1, VH2, and/or VH3 of each and every antigen binding polypeptide and antigen binding polypeptide complex described herein may independently bind to any one of said particularly preferred targets.

[0183] In another aspect, the invention is directed to an antigen binding polypeptide complex (e.g., an antibody or antigen binding fragment thereof) comprising a first polypeptide having a structure represented by VL1-VL2-VH2-VH1-Fc, VH1-VH2-VL2-VL1-Fc, VL1-L1-VL2-L2-VH2-L3-VH1-Fc, VH1-L1-VH2-L2-VL2-L3-VH1-Fc, VL1-L1-VL2-L2-VH2-L3-VH1-L4-Fc, or VH1-L1-VH2-L2-VL2-L3-VL1-L4-Fc; and a second polypeptide having a structure represented by VL3-VH3-CL-CH1-Fc, VL3-L1-VH3-L2-CL-CH1-Fc, VH3-VL3-CL-CH1-Fc, VH3-L1-VL3-L2-CL-CH1-Fc, VL3-VH3-CH1-CL-Fc, VL3-L1-VH3-L2-CH1-CL-Fc, VH3-VL3-CH1-CL-Fc, or VH3-L1-VL3-L2-CH1-CL-Fc; wherein VL1 is a first immunoglobulin light chain variable region that specifically binds to A2AR, APRIL, ATPDase, BAFF, BAFFR, BCMA, BlyS, BTK, BTLA, B7DC, B7H1, B7H2, B7H3, B7H4, B7H5, B7H6, B7H7, B7RP1, B7-4, C3, C5, CCL2, CCL3, CCL4, CCL5, CCL7, CCL8, CCLI1, CCL15, CCL17, CCL19, CCL20, CCL21, CCL25 CCR3, CCR4, CD3, CD19, CD20, CD24, CD27, CD28, CD38, CD39, CD40, CD40L, CD47, CD52, CD70, CD80, CD86, CD123, CD133, CD137, CD137L, CD160, CD272, CEACAM5, CLEC9, CLEC91, CRTH2, CSF-1, CSF-2, CSF-3, CXCL1, CXCL2, CXCL4, CXCL12, CXCL13, CXCR3, cMet, CTLA4, DLL3, DNGR-1, E-cadherin, EGFR, ENTPD1, EpCAM, FCER1, FCER1A, FCER2, FGFR, FLAP, FOLH1, Gi24, GITR, GITRL, GPR5, HER2, HER3, ICOSL, ICOS, HHLA2, HMGB1, HVEM, IDO, IFNa, IgE, IGF1R, IL2Rbeta, IL1, IL1A, IL1B, IL1F10, IL2, IL4, IL4Ra, IL5, IL5R, IL6, IL7, IL7Ra, IL8, IL9, IL9R, IL10, rhIL10, IL12, IL13, IL13Ra1, IL13Ra2, IL15, IL17, IL17Rb, IL18, IL22, IL23, IL25, IL7, IL33, IL35, ITGB4, ITK, KIR, LAG3, LAMP1, leptin, LPFS2, MHC class II, MUC-1, MUC-16, NCR3LG1, NKG2D, NKp46, NTPDase-1, OX40, OX40L, PD-1, PD-L1, PD-L2, PROM1, S152, SIRPalpha, SISP1, SLC, SPG64, ST2, STEAP1, STEAP2, Syk kinase, STEAP1, TROP2, TACI, TDO, T14, TIGIT, TIM3, TLR, TLR2, TLR4, TLR5, TLR9, TMEF1, TNFa, TNFRSF7, Tp55, TREM1, TSLP, TSLPR, TWEAK, VEGF, VISTA, Vstm3, WUCAM, DLL4, TGFbeta, GP100, GPRC5D, CD30 or CD16A; VL2 is a second immunoglobulin light chain variable region that specifically binds to A2AR, APRIL, ATPDase, BAFF, BAFFR, BCMA, BlyS, BTK, BTLA, B7DC, B7H1, B7H2, B7H3, B7H4, B7H5, B7H6, B7H7, B7RP1, B7-4, C3, C5, CCL2, CCL3, CCL4, CCL5, CCL7, CCL8, CCL11, CCL15, CCL17, CCL19, CCL20, CCL21, CCL25 CCR3, CCR4, CD3, CD19, CD20, CD24, CD27, CD28, CD38, CD39, CD40, CD40L, CD47, CD52, CD70, CD80, CD86, CD123, CD133, CD137, CD137L, CD160, CD272, CEACAM5, CLEC9, CLEC91, CRTH2, CSF-1, CSF-2, CSF-3, CXCL1, CXCL2, CXCL4, CXCL12, CXCL13, CXCR3, cMet, CTLA4, DLL3, DNGR-1, E-cadherin, EGFR, ENTPD1, EpCAM, FCER1, FCER1A, FCER2, FGFR, FLAP, FOLH1, Gi24, GITR, GITRL, GPR5, HER2, HER3, ICOSL, ICOS, HHLA2, HMGB1, HVEM, IDO, IFNa, IgE, IGF1R, IL2Rbeta, IL1, IL1A, IL1B, ILF10, IL2, IL4, IL4Ra, IL5, IL5R, IL6, IL7, IL7Ra, IL8, IL9, IL9R, IL10, rhIL10, IL12, IL13, IL13Ra1, IL13Ra2, IL15, IL17, IL17Rb, IL18, IL22, IL23, IL25, IL7, IL33, IL35, ITGB4, ITK, KIR, LAG3, LAMP1, leptin, LPFS2, MHC class II, MUC-1, MUC-16, NCR3LG1, NKG2D, NKp46, NTPDase-1, OX40, OX40L, PD-1, PD-L1, PD-L2, PROM1, S152, SIRPalpha, SISP1, SLC, SPG64, ST2, STEAP1, STEAP2, Syk kinase, STEAP1, TROP2, TACI, TDO, T14, TIGIT, TIM3, TLR, TLR2, TLR4, TLR5, TLR9, TMEF1, TNFa, TNFRSF7, Tp55, TREM1, TSLP, TSLPR, TWEAK, VEGF, VISTA, Vstm3, WUCAM, DLL4, TGFbeta, GP100, GPRC5D, CD30 or CD16A; VL3 is a third immunoglobulin light chain variable region that specifically binds to A2AR, APRIL, ATPDase, BAFF, BAFFR, BCMA, BlyS, BTK, BTLA, B7DC, B7H1, B7H2, B7H3, B7H4, B7H5, B7H6, B7H7, B7RP1, B7-4, C3, C5, CCL2, CCL3, CCL4, CCL5, CCL7, CCL8, CCL11, CCL15, CCL17, CCL19, CCL20, CCL21, CCL25 CCR3, CCR4, CD3, CD19, CD20, CD24, CD27, CD28, CD38, CD39, CD40, CD40L, CD47, CD52, CD70, CD80, CD86, CD123, CD133, CD137, CD137L, CD160, CD272, CEACAM5, CLEC9, CLEC91, CRTH2, CSF-1, CSF-2, CSF-3, CXCL1, CXCL2, CXCL4, CXCL12, CXCL13, CXCR3, cMet, CTLA4, DLL3, DNGR-1, E-cadherin, EGFR, ENTPD1, EpCAM, FCER1, FCER1A, FCER2, FGFR, FLAP, FOLH1, Gi24, GITR, GITRL, GPR5, HER2, HER3, ICOSL, ICOS, HHLA2, HMGB1, HVEM, IDO, IFNa, IgE, IGF1R, IL2Rbeta, IL1, IL1A, IL1B, IL1F10, IL2, IL4, IL4Ra, IL5, IL5R, IL6, IL7, IL7Ra, IL8, IL9, IL9R, IL10, rhIL10, IL12, IL13, IL13Ra1, IL13Ra2, IL15, I17, IL17Rh, IL18, IL22, IL23, IL25, IL7, IL33, IL35, ITGB4, ITK, KIR, LAG3, LAMP1, leptin, LPFS2, MHC class II, MUC-1, MUC-16, NCR3LG1, NKG2D, NKp46, NTPDase-1, OX40, OX40L, PD-1, PD-L1, PD-L2, PROM1, S1S2, SIRPalpha, SISP1, SLC, SPG64, ST2, STEAP1, STEAP2, Syk kinase, STEAP1, TROP2, TACI, TDO, T14, TIGIT, TIM3, TLR, TLR2, TLR4, TLR5, TLR9, TMEF1, TNFa, TNFRSF7, Tp55, TREM1, TSLP, TSLPR, TWEAK, VEGF, VISTA, Vstm3, WUCAM, DLL4, TGFbeta, GP100, GPRC5D, CD30 or CD16A; VH1 is a first immunoglobulin heavy chain variable region that specifically binds to A2AR, APRIL, ATPDase, BAFF, BAFFR, BCMA, BlyS, BTK, BTLA, B7DC, B7H1, B7H2, B7H3, B7H4, B7H5, B7H6, B7H7, B7RP1, B7-4, C3, C5, CCL2, CCL3, CCL4, CCL5, CCL7, CCL8, CCL11, CCL15, CCL17, CCL19, CCL20, CCL21, CCL25 CCR3, CCR4, CD3, CD19, CD20, CD24, CD27, CD28, CD38, CD39, CD40, CD40L, CD47, CD52, CD70, CD80, CD86, CD123, CD133, CD137, CD137L, CD160, CD272, CEACAM5, CLEC9, CLEC91, CRTH2, CSF-1, CSF-2, CSF-3, CXCL1, CXCL2, CXCL4, CXCL12, CXCL13, CXCR3, cMet, CTLA4, DLL3, DNGR-1, E-cadherin, EGFR, ENTPD1, EpCAM, FCER1, FCER1A, FCER2, FGFR, FLAP, FOLH1, Gi24, GITR, GITRL, GPR5, HER2, HER3, ICOSL, ICOS, HHLA2, HMGB1, HVEM, IDO, IFNa, IgE, IGF1R, IL2Rbeta, IL1, IL1A, IL1B, IL1F10, IL2, IL4, IL4Ra, IL5, IL5R, IL6, IL7, IL7Ra, IL8, IL9, IL9R, IL10, rhIL10, IL12, IL13, R13Ra1, IL13Ra2, IL15, IL17, IL17Rb, IL18, IL22, IL23, IL25, IL7, IL33, IL35, ITGB4, ITK, KIR, LAG3, LAMP1, leptin, LPFS2, MHC class II, MUC-1, MUC-16, NCR3LG1, NKG2D, NKp46, NTPDase-1, OX40, OX40L, PD-1, PD-L1, PD-L2, PROM1, S152, SIRPalpha, SISP1, SLC, SPG64, ST2, STEAP1, STEAP2, Syk kinase, STEAP1, TROP2, TACI, TDO, T14, TIGIT, TIM3, TLR, TLR2, TLR4, TLR5, TLR9, TMEF1, TNFa, TNFRSF7, Tp55, TREM1, TSLP, TSLPR, TWEAK, VEGF, VISTA, Vstm3, WUCAM, DLL4, TGFbeta, GP100, GPRC5D, CD30 or CD16A; VH2 is a second immunoglobulin heavy chain variable region that specifically binds to A2AR, APRIL, ATPDase, BAFF, BAFFR, BCMA, BlyS, BTK, BTLA, B7DC, B7H1, B7H2, B7H3, B7H4, B7H5, B7H6, B7H7, B7RP1, B7-4, C3, C5, CCL2, CCL3, CCL4, CCL5, CCL7, CCL8, CCL11, CCL15, CCL17, CCL19, CCL20, CCL21, CCL25 CCR3, CCR4, CD3, CD19, CD20, CD24, CD27, CD28, CD38, CD39, CD40, CD40L, CD47, CD52, CD70, CD80, CD86, CD123, CD133, CD137, CD137L, CD160, CD272, CEACAM5, CLEC9, CLEC91, CRTH2, CSF-1, CSF-2, CSF-3, CXCL1, CXCL2, CXCL4, CXCL12, CXCL13, CXCR3, cMet, CTLA4, DLL3, DNGR-1, E-cadherin, EGFR, ENTPD1, EpCAM, FCER1, FCER1A, FCER2, FGFR, FLAP, FOLH1, Gi24, GITR, GITRL, GPR5, HER2, HER3, ICOSL, ICOS, HHLA2, HMGB1, HVEM, IDO, IFNa, IgE, IGF1R, IL2Rbeta, IL1, IL1A, IL1B, IL1F10, IL2, IL4, IL4Ra, IL5, IL5R, IL6, IL7, IL7Ra, IL8, IL9, IL9R, IL10, rhIL10, IL12, IL13, IL13Ra1, IL13Ra2, IL15, IR17, IL17Rb, IL18, IR22, IL23, IL25, IL7, IL33, IL35, ITGB4, ITK, KIR, LAG3, LAMP1, leptin, LPFS2, MHC class II, MUC-1, MUC-16, NCR3LG1, NKG2D, NKp46, NTPDase-1, OX40, OX40L, PD-1, PD-L1, PD-L2, PROM1, S152, SIRPalpha, SISP1, SLC, SPG64, ST2, STEAP1, STEAP2, Syk kinase, STEAP1, TROP2, TACI, TDO, T14, TIGIT, TIM3, TLR, TLR2, TLR4, TLR5, TLR9, TMEF1, TNFa, TNFRSF7, Tp55, TREM1, TSLP, TSLPR, TWEAK, VEGF, VISTA, Vstm3, WUCAM, DLL4, TGFbeta, GP100, GPRC5D, CD30 or CD16A; VH3 is a third immunoglobulin heavy chain variable region that specifically binds to A2AR, APRIL, ATPDase, BAFF, BAFFR, BCMA, BlyS, BTK, BTLA, B7DC, B7H1, B7H2, B7H3, B7H4, B7H5, B7H6, B7H7, B7RP1, B7-4, C3, C5, CCL2, CCL3, CCL4, CCL5, CCL7, CCL8, CCL11, CCL15, CCL17, CCL19, CCL20, CCL21, CCL25 CCR3, CCR4, CD3, CD19, CD20, CD24, CD27, CD28, CD38, CD39, CD40, CD40L, CD47, CD52, CD70, CD80, CD86, CD123, CD133, CD137, CD137L, CD160, CD272, CEACAM5, CLEC9, CLEC91, CRTH2, CSF-1, CSF-2, CSF-3, CXCL1, CXCL2, CXCL4, CXCL12, CXCL13, CXCR3, cMet, CTLA4, DLL3, DNGR-1, E-cadherin, EGFR, ENTPD1, EpCAM, FCER1, FCER1A, FCER2, FGFR, FLAP, FOLH1, Gi24, GITR, GITRL, GPR5, HER2, HER3, ICOSL, ICOS, HHLA2, HMGB1, HVEM, IDO, IFNa, IgE, IGF1R, IL2Rbeta, IL1, IL1A, IL1B, IL1F10, IL2, IL4, IR4Ra, IL5, IR, IL6, IL7, IL7Ra, IL8, IL9, IL9R, IL10, rhIL10, IL12, IL13, R13Ra1, IL13Ra2, IL15, IL17, IL17Rb, IL18, IL22, IL23, IL25, IL7, IL33, IL35, ITGB4, ITK, KIR, LAG3, LAMP1, leptin, LPFS2, MHC class II, MUC-1, MUC-16, NCR3LG1, NKG2D, NKp46, NTPDase-1, OX40, OX40L, PD-1, PD-L1, PD-L2, PROM1, S152, SIRPalpha, SISP1, SLC, SPG64, ST2, STEAP1, STEAP2, Syk kinase, STEAP1, TROP2, TACI, TDO, T14, TIGIT, TIM3, TLR, TLR2, TLR4, TLR5, TLR9, TMEF1, TNFa, TNFRSF7, Tp55, TREM1, TSLP, TSLPR, TWEAK, VEGF, VISTA, Vstm3, WUCAM, DLL4, TGFbeta, GP100, GPRC5D, CD30 or CD16A; Fe is a region comprising an immunoglobulin heavy chain constant region 2 (CH2), an immunoglobulin heavy chain constant region 3 (CH3), and optionally, an immunoglobulin hinge; CH1 is an immunoglobulin heavy chain constant region 1; CL is an immunoglobulin light chain constant region; and L1, L2, L3 and L4 are amino acid linkers. In some aspects, VH1 and VL1 specifically bind to CD3, VH2 and VL2 specifically bind to CD28, and VH3 and VL3 specifically bind to CD38. In another aspect, VH1 and VL1 specifically bind to CD3, VH2 and VL2 specifically bind to CD28, and VH3 and VL3 specifically bind to CD19. In another aspect, VH1 and VL1 specifically bind to CD28, VH2 and VL2 specifically bind to CD3, and VH3 and VL3 specifically bind to CD38. In another aspect, VH1 and VL1 specifically bind to CD28, VH2 and VL2 specifically bind to CD3, and VH3 and VL3 specifically bind to CD19. In some aspects, the first polypeptide has a structure represented by VL1-VL2-VH2-VH1-Fc, VH1-VH2-VL2-VL1-Fc, VL1-L1-VL2-L2-VH2-L3-VH1-Fc, VH1-L1-VH2-L2-VL2-L3-VH1-Fc, VL1-L1-VL2-L2-VH2-L3-VH1-L4-Fc, or VH1-L1-VH2-L2-VL2-L3-VL1-L4-Fc and a second polypeptide having a structure represented by VL3-VH3-CL-CH1-Fc. In some aspects, the first polypeptide has a structure represented by VL1-VL2-VH2-VH1-Fc, VH1-VH2-VL2-VL1-Fc, VL1-L1-VL2-L2-VH2-L3-VH1-Fc, VH1-L1-VH2-L2-VL2-L3-VH1-Fc, VL1-L1-VL2-L2-VH2-L3-VH1-L4-Fc, or VH1-L1-VH2-L2-VL2-L3-VL1-L4-Fc and a second polypeptide having a structure represented by VL3-L1-VH3-L2-CL-CH1-Fc. In some aspects, the first polypeptide has a structure represented by VL1-VL2-VH2-VH1-Fc, VH1-VH2-VL2-VL1-Fc, VL1-L1-VL2-L2-VH2-L3-VH1-Fc, VH1-L1-VH2-L2-VL2-L3-VH1-Fc, VL1-L1-VL2-L2-VH2-L3-VH1-L4-Fc, or VH1-L1-VH2-L2-VL2-L3-VL1-L4-Fc and a second polypeptide having a structure represented by VH3-VL3-CL-CH1-Fc. In some aspects, the first polypeptide has a structure represented by VL1-VL2-VH2-VH1-Fc, VH1-VH2-VL2-VL1-Fc, VL1-L1-VL2-L2-VH2-L3-VH1-Fc, VH1-L1-VH2-L2-VL2-L3-VH1-Fc, VL1-L1-VL2-L2-VH2-L3-VH1-L4-Fc, or VH1-L1-VH2-L2-VL2-L3-VL1-L4-Fc and a second polypeptide having a structure represented by VH3-L1-VL3-L2-CL-CH1-Fc. In some aspects, the first polypeptide has a structure represented by VL1-VL2-VH2-VH1-Fc, VH1-VH2-VL2-VL1-Fc, VL1-L1-VL2-L2-VH2-L3-VH1-Fc, VH1-L1-VH2-L2-VL2-L3-VH1-Fc, VL1-L1-VL2-L2-VH2-L3-VH1-L4-Fc, or VH1-L1-VH2-L2-VL2-L3-VL1-L4-Fc and a second polypeptide having a structure represented by VL3-VH3-CH1-CL-Fc. In some aspects, the first polypeptide has a structure represented by VL1-VL2-VH2-VH1-Fc, VH1-VH2-VL2-VL1-Fc, VL1-L1-VL2-L2-VH2-L3-VH1-Fc, VH1-L1-VH2-L2-VL2-L3-VH1-Fc, VL1-L1-VL2-L2-VH2-L3-VH1-L4-Fc, or VH1-L1-VH2-L2-VL2-L3-VL1-L4-Fc and a second polypeptide having a structure represented by VL3-L1-VH3-L2-CH1-CL-Fc. In some aspects, the first polypeptide has a structure represented by VL1-VL2-VH2-VH1-Fc, VH1-VH2-VL2-VL1-Fc, VL1-L1-VL2-L2-VH2-L3-VH1-Fc, VH1-L1-VH2-L2-VL2-L3-VH1-Fc, VL1-L1-VL2-L2-VH2-L3-VH1-L4-Fc, or VH1-L1-VH2-L2-VL2-L3-VL1-L4-Fc and a second polypeptide having a structure represented by VH3-VL3-CH1-CL-Fc. In some aspects, the first polypeptide has a structure represented by VL1-VL2-VH2-VH1-Fc, VH1-VH2-VL2-VL1-Fc, VL1-L1-VL2-L2-VH2-L3-VH1-Fc, VH1-L1-VH2-L2-VL2-L3-VH1-Fc, VL1-L1-VL2-L2-VH2-L3-VH1-L4-Fc, or VH1-L1-VH2-L2-VL2-L3-VL1-L4-Fc and a second polypeptide having a structure represented by VH3-L1-VL3-L2-CH1-CL-Fc, The VL1, VL2, VL3, VH1, VH2, and/or VH3 may specifically bind to A2AR, APRIL, ATPDase, BAFF, BAFFR, BCMA, BlyS, BTK, BTLA, B7DC, B7H1, B7H2, B7H3, B7H4, B7H5, B7H6, B7H7, B7RP1, B7-4, C3, C5, CCL2, CCL3, CCL4, CCL5, CCL7, CCL8, CCL11, CCL15, CCL17, CCL19, CCL20, CCL21, CCL25 CCR3, CCR4, CD3, CD19, CD20, CD24, CD27, CD28, CD38, CD39, CD40, CD40L, CD47, CD52, CD70, CD80, CD86, CD123, CD133, CD137, CD137L, CD160, CD272, CEACAM5, CLEC9, CLEC91, CRTH2, CSF-1, CSF-2, CSF-3, CXCL1, CXCL2, CXCL4, CXCL12, CXCL13, CXCR3, cMet, CTLA4, DLL3, DNGR-1, E-cadherin, EGFR, ENTPD1, EpCAM, FCER1, FCER1A, FCER2, FGFR, FLAP, FOLH1, Gi24, GITR, GITRL, GPR5, HER2, HER3, ICOSL, ICOS, HHLA2, HMGB1, HVEM, IDO, IFNa, IgE, IGF1R, IL2Rbeta, IL1, IL1A, IL1B, IL1F10, IL2, IL4, IL4Ra, IL5, IL5R, IL6, IL7, IL7Ra, IL8, IL9, IL9R, 110, rhIL10, IL12, IL13, IL13Ra1, IL13Ra2, IL15, 117, IL17Rb, IL18, IL22, IL23, IL25, IL7, IL33, IL35, ITGB4, ITK, KIR, LAG3, LAMP1, leptin, LPFS2, MHC class II, MUC-1, MUC-16, NCR3LG1, NKG2D, NKp46, NTPDase-1, OX40, OX40L, PD-1, PD-L1, PD-L2, PROM1, S152, SIRPalpha, SISP1, SLC, SPG64, ST2, STEAP1, STEAP2, Syk kinase, STEAP1, TROP2, TACI, TDO, T14, TIGIT, TIM3, TLR, TLR2, TLR4, TLR5, TLR9, TMEF1, TNFa, TNFRSF7, Tp55, TREM1, TSLP, TSLPR, TWEAK, VEGF, VISTA, Vstm3, WUCAM, DLL4, TGFbeta, GP100, GPRC5D, CD30 or CD16A. For the avoidance of doubt, all the antigen binding polypeptide complex structures described herein can be combined with any one or more of the targets described herein. Any and all disclosure herein in relation to targets for antigen binding polypeptides of the invention is generally applicable, and applies equally and without reservation to each and every antigen binding polypeptide and antigen binding polypeptide complex described herein. For the avoidance of doubt, the VL1, VL2, VL3, VH1, VH2, and/or VH3 of each and every antigen binding polypeptide and antigen binding polypeptide complex described herein may independently bind to any one of said particularly preferred targets.

[0184] In another aspect, the invention is directed to an antigen binding polypeptide complex (e.g., an antibody or antigen binding fragment thereof) comprising a first polypeptide having a structure represented by VL1-VL2-VH2-VH1-CH1-Fc, VH1-VH2-VL2-VL1-CH1-Fc, VL1-L1-VL2-L2-VH2-L3-VH1-CH1-Fc, VH1-L1-VH2-L2-VL2-L3-VH1-CH1-Fc, VL1-VL2-VH2-VH1-CL-Fc, VH1-VH2-VL2-VL1-CL-Fc, VL1-L1-VL2-L2-VH2-L3-VH1-CL-Fe, or VH1-L1-VH2-L2-VL2-L3-VH1-CL-Fc; and a second polypeptide having a structure represented by VL3-VH3-CL-Fc, VL3-L1-VH3-L2-CL-Fc, VH3-VL3-CL-Fc, VH3-L1-VL3-L2-CL-Fc, VL3-VH3-CH1-Fc, VL3-L1-VH3-L2-CH1-Fc, VH3-VL3-CH1-Fc, or VH3-L1-VL3-L2-CH1-Fc; wherein VL1 is a first immunoglobulin light chain variable region that specifically binds to A2AR, APRIL, ATPDase, BAFF, BAFFR, BCMA, BlyS, BTK, BTLA, B7DC, B7H1, B7H2, B7H3, B7H4, B7H5, B7H6, B7H7, B7RP1, B7-4, C3, C5, CCL2, CCL3, CCL4, CCLS, CCL7, CCL8, CCL11, CCL15, CCL17, CCL19, CCL20, CCL21, CCL25 CCR3, CCR4, CD3, CD19, CD20, CD24, CD27, CD28, CD38, CD39, CD40, CD40L, CD47, CD52, CD70, CD80, CD86, CD123, CD133, CD137, CD137L, CD160, CD272, CEACAM5, CLEC9, CLEC91, CRTH2, CSF-1, CSF-2, CSF-3, CXCL1, CXCL2, CXCL4, CXCL12, CXCL13, CXCR3, cMet, CTLA4, DLL3, DNGR-1, E-cadherin, EGFR, ENTPD1, EpCAM, FCER1, FCER1A, FCER2, FGFR, FLAP, FOLH1, Gi24, GITR, GITRL, GPR5, HER2, HER3, ICOSL, ICOS, HHLA2, HMGB1, HVEM, IDO, IFNa, IgE, IGF1R, IL2Rbeta, IL1, IL1A, IL1B, ILF10, IL2, IL4, IL4Ra, IL5, IL5R, IL6, IL7, IL7Ra, IL8, IL9, IL9R, IL10, rhIL10, 1112, IL13, IL13Ra1, IL13Ra2, IL15, IL17, IL17Rb, IL18, IL22, IL23, IL25, IL7, IL33, IL35, ITGB4, ITK, KIR, LAG3, LAMP1, leptin, LPFS2, MHC class II, MUC-1, MUC-16, NCR3LG1, NKG2D, NKp46, NTPDase-1, OX40, OX40L, PD-1, PD-L1, PD-L2, PROM1, S152, SIRPalpha, SISP1, SLC, SPG64, ST2, STEAP1, STEAP2, Syk kinase, STEAP1, TROP2, TACI, TDO, T14, TIGIT, TIM3, TLR, TLR2, TLR4, TLRS, TLR9, TMEF1, TNFa, TNFRSF7, Tp55, TREM1, TSLP, TSLPR, TWEAK, VEGF, VISTA, Vstm3, WUCAM, DLL4, TGFbeta, GP100, GPRC5D, CD30 or CD16A; VL2 is a second immunoglobulin light chain variable region that specifically binds to A2AR, APRIL, ATPDase, BAFF, BAFFR, BCMA, BlyS, BTK, BTLA, B7DC, B7H1, B7H2, B7H3, B7H4, B7H5, B7H6, B7H7, B7RP1, B7-4, C3, C5, CCL2, CCL3, CCL4, CCL5, CCL7, CCL8, CCL11, CCL15, CCL17, CCL19, CCL20, CCL21, CCL25 CCR3, CCR4, CD3, CD19, CD20, CD24, CD27, CD28, CD38, CD39, CD40, CD40L, CD47, CD52, CD70, CD80, CD86, CD123, CD133, CD137, CD137L, CD160, CD272, CEACAM5, CLEC9, CLEC91, CRTH2, CSF-1, CSF-2, CSF-3, CXCL1, CXCL2, CXCL4, CXCL12, CXCL13, CXCR3, cMet, CTLA4, DLL3, DNGR-1, E-cadherin, EGFR, ENTPD1, EpCAM, FCER1, FCER1A, FCER2, FGFR, FLAP, FOLH1, Gi24, GITR, GITRL, GPR5, HER2, HER3, ICOSL, ICOS, HHLA2, HMGB1, HVEM, IDO, IFNa, IgE, IGF1R, IL2Rbeta, IL1, IL1A, IL1B, IL1F10, IL2, IL4, IL4Ra, IL5, IL5R, IL6, IL7, IL7Ra, IL8, IL9, IL9R, IL10, rhIL10, IL12, IL13, IL13Ra1, IL13Ra2, IL15, IL17, IL17Rb, IL18, IL22, IL23, IL25, IL7, IL33, IL35, ITGB4, ITK, KIR, LAG3, LAMP1, leptin, LPFS2, MHC class II, MUC-1, MUC-16, NCR3LG1, NKG2D, NKp46, NTPDase-1, OX40, OX40L, PD-1, PD-L1, PD-L2, PROM1, S152, SIRPalpha, SISP1, SLC, SPG64, ST2, STEAP1, STEAP2, Syk kinase, STEAP1, TROP2, TACI, TDO, T14, TIGIT, TIM3, TLR, TLR2, TLR4, TLR5, TLR9, TMEF1, TNFa, TNFRSF7, Tp55, TREM1, TSLP, TSLPR, TWEAK, VEGF, VISTA, Vstm3, WUCAM, DLL4, TGFbeta, GP100, GPRC5D, CD30 or CD16A; VL3 is a third immunoglobulin light chain variable region that specifically binds to A2AR, APRIL, ATPDase, BAFF, BAFFR, BCMA, BlyS, BTK, BTLA, B7DC, B7H1, B7H2, B7H3, B7H4, B7H5, B7H6, B7H7, B7RP1, B7-4, C3, C5, CCL2, CCL3, CCL4, CCL5, CCL7, CCL8, CCL11, CCL15, CCL17, CCL19, CCL20, CCL21, CCL25 CCR3, CCR4, CD3, CD19, CD20, CD24, CD27, CD28, CD38, CD39, CD40, CD40L, CD47, CD52, CD70, CD80, CD86, CD123, CD133, CD137, CD137L, CD160, CD272, CEACAM5, CLEC9, CLEC91, CRTH2, CSF-1, CSF-2, CSF-3, CXCL1, CXCL2, CXCL4, CXCL12, CXCL13, CXCR3, cMet, CTLA4, DLL3, DNGR-1, E-cadherin, EGFR, ENTPD1, EpCAM, FCER1, FCER1A, FCER2, FGFR, FLAP, FOLH1, Gi24, GITR, GITRL, GPR5, HER2, HER3, ICOSL, ICOS, HHLA2, HMGB1, HVEM, IDO, IFNa, IgE, IGF1R, IL2Rbeta, IL1, IL1A, IL1B, IL1F10, IL2, I4, I4Ra, IL5, IR, IL6, IL7, IL7Ra, IL8, IL9, IL9R, IL10, rhIL10, IL12, IL13, R13Ra1, IL13Ra2, IL15, IL17, IL17Rb, IL18, IL22, IL23, IL25, IL7, IL33, IL35, ITGB4, ITK, KIR, LAG3, LAMP1, leptin, LPFS2, MHC class II, MUC-1, MUC-16, NCR3LG1, NKG2D, NKp46, NTPDase-1, OX40, OX40L, PD-1, PD-L1, PD-L2, PROM1, S152, SIRPalpha, SISP1, SLC, SPG64, ST2, STEAP1, STEAP2, Syk kinase, STEAP1, TROP2, TACI, TDO, T14, TIGIT, TIM3, TLR, TLR2, TLR4, TLR5, TLR9, TMEF1, TNFa, TNFRSF7, Tp55, TREM1, TSLP, TSLPR, TWEAK, VEGF, VISTA, Vstm3, WUCAM, DLL4, TGFbeta, GP100, GPRC5D, CD30 or CD16A; VH1 is a first immunoglobulin heavy chain variable region that specifically binds to A2AR, APRIL, ATPDase, BAFF, BAFFR, BCMA, BlyS, BTK, BTLA, B7DC, B7H1, B7H2, B7H3, B7H4, B7H5, B7H6, B7H7, B7RP1, B7-4, C3, C5, CCL2, CCL3, CCL4, CCL5, CCL7, CCL8, CCL11, CCL15, CCL17, CCL19, CCL20, CCL21, CCL25 CCR3, CCR4, CD3, CD19, CD20, CD24, CD27, CD28, CD38, CD39, CD40, CD40L, CD47, CD52, CD70, CD80, CD86, CD123, CD133, CD137, CD137L, CD160, CD272, CEACAM5, CLEC9, CLEC91, CRTH2, CSF-1, CSF-2, CSF-3, CXCL1, CXCL2, CXCL4, CXCL12, CXCL13, CXCR3, cMet, CTLA4, DLL3, DNGR-1, E-cadherin, EGFR, ENTPD1, EpCAM, FCER1, FCER1A, FCER2, FGFR, FLAP, FOLH1, Gi24, GITR, GITRL, GPR5, HER2, HER3, ICOSL, ICOS, HHLA2, HMGB1, HVEM, IDO, IFNa, IgE, IGF1R, IL2Rbeta, IL1, IL1A, IL1B, IL1F10, IL2, IL4, IL4Ra, IL5, IL5R, IL6, IL7, IL7Ra, IL8, IL9, IL9R, IL10, rhIL10, IL12, IL13, IL13Ra1, IL13Ra2, IL15, IL17, IL17Rb, IL18, IL22, IL23, IL25, IL7, IL33, IL35, ITGB4, ITK, KIR, LAG3, LAMP1, leptin, LPFS2, MHC class II, MUC-1, MUC-16, NCR3LG1, NKG2D, NKp46, NTPDase-1, OX40, OX40L, PD-1, PD-L1, PD-L2, PROM1, S152, SIRPalpha, SISP1, SLC, SPG64, ST2, STEAP1, STEAP2, Syk kinase, STEAP1, TROP2, TACI, TDO, T14, TIGIT, TIM3, TLR, TLR2, TLR4, TLR5, TLR9, TMEF1, TNFa, TNFRSF7, Tp55, TREM1, TSLP, TSLPR, TWEAK, VEGF, VISTA, Vstm3, WUCAM, DLL4, TGFbeta, GP100, GPRC5D, CD30 or CD16A; VH2 is a second immunoglobulin heavy chain variable region that specifically binds to A2AR, APRIL, ATPDase, BAFF, BAFFR, BCMA, BlyS, BTK, BTLA, B7DC, B7H1, B7H2, B7H3, B7H4, B7H5, B7H6, B7H7, B7RP1, B7-4, C3, C5, CCL2, CCL3, CCL4, CCL5, CCL7, CCL8, CCL11, CCL15, CCL17, CCL19, CCL20, CCL21, CCL25 CCR3, CCR4, CD3, CD19, CD20, CD24, CD27, CD28, CD38, CD39, CD40, CD40L, CD47, CD52, CD70, CD80, CD86, CD123, CD133, CD137, CD137L, CD160, CD272, CEACAM5, CLEC9, CLEC91, CRTH2, CSF-1, CSF-2, CSF-3, CXCL1, CXCL2, CXCL4, CXCL12, CXCL13, CXCR3, cMet, CTLA4, DLL3, DNGR-1, E-cadherin, EGFR, ENTPD1, EpCAM, FCER1, FCER1A, FCER2, FGFR, FLAP, FOLH1, Gi24, GITR, GITRL, GPR5, HER2, HER3, ICOSL, ICOS, HHLA2, HMGB1, HVEM, IDO, IFNa, IgE, IGF1R, IL2Rbeta, IL1, IL1A, IL1B, IL1F10, IL2, IL4, IL4Ra, IL5, IL5R, IL6, IL7, IL7Ra, IL8, IL9, IL9R, IL10, rhIL10, IL12, IL13, IL13Ra1, IL13Ra2, IL15, IL17, IL17Rb, IL18, IL22, IL23, IL25, IL7, IL33, IL35, ITGB4, ITK, KIR, LAG3, LAMP1, leptin, LPFS2, MHC class II, MUC-1, MUC-16, NCR3LG1, NKG2D, NKp46, NTPDase-1, OX40, OX40L, PD-1, PD-L1, PD-L2, PROM1, S152, SIRPalpha, SISP1, SLC, SPG64, ST2, STEAP1, STEAP2, Syk kinase, STEAP1, TROP2, TACI, TDO, T14, TIGIT, TIM3, TLR, TLR2, TLR4, TLR5, TLR9, TMEF1, TNFa, TNFRSF7, Tp55, TREM1, TSLP, TSLPR, TWEAK, VEGF, VISTA, Vstm3, WUCAM, DLL4, TGFbeta, GP100, GPRC5D, CD30 or CD16A; VH3 is a third immunoglobulin heavy chain variable region that specifically binds to A2AR, APRIL, ATPDase, BAFF, BAFFR, BCMA, BlyS, BTK, BTLA, B7DC, B7H1, B7H2, B7H3, B7H4, B7H5, B7H6, B7H7, B7RP1, B7-4, C3, C5, CCL2, CCL3, CCL4, CCL5, CCL7, CCL8, CCL11, CCL15, CCL17, CCL19, CCL20, CCL21, CCL25 CCR3, CCR4, CD3, CD19, CD20, CD24, CD27, CD28, CD38, CD39, CD40, CD40L, CD47, CD52, CD70, CD80, CD86, CD123, CD133, CD137, CD137L, CD160, CD272, CEACAM5, CLEC9, CLEC91, CRTH2, CSF-1, CSF-2, CSF-3, CXCL1, CXCL2, CXCL4, CXCL12, CXCL13, CXCR3, cMet, CTLA4, DLL3, DNGR-1, E-cadherin, EGFR, ENTPD1, EpCAM, FCER1, FCER1A, FCER2, FGFR, FLAP, FOLH1, Gi24, GITR, GITRL, GPR5, HER2, HER3, ICOSL, ICOS, HHLA2, HMGB1, HVEM, IDO, IFNa, IgE, IGF1R, IL2Rbeta, IL1, IL1A, IL1B, IL1F10, IL2, IL4, IL4Ra, IL5, IL5R, IL6, IL7, IL7Ra, IL8, IL9, IL9R, IL10, rhIL10, IL12, IL13, IL13Ra1, IL13Ra2, IL15, IL17, IL17Rb, IL18, IL22, IL23, IL25, IL7, IL33, IL35, ITGB4, ITK, KIR, LAG3, LAMP1, leptin, LPFS2, MHC class II, MUC-1, MUC-16, NCR3LG1, NKG2D, NKp46, NTPDase-1, OX40, OX40L, PD-1, PD-L1, PD-L2, PROM1, S152, SIRPalpha, SISP1, SLC, SPG64, ST2, STEAP1, STEAP2, Syk kinase, STEAP1, TROP2, TACI, TDO, T14, TIGIT, TIM3, TLR, TLR2, TLR4, TLR5, TLR9, TMEF1, TNFa, TNFRSF7, Tp55, TREM1, TSLP, TSLPR, TWEAK, VEGF, VISTA, Vstm3, WUCAM, DLL4, TGFbeta, GP100, GPRC5D, CD30 or CD16A; Fc is a region comprising an immunoglobulin heavy chain constant region 2 (CH2), an immunoglobulin heavy chain constant region 3 (CH3), and optionally, an immunoglobulin hinge; CH1 is an immunoglobulin heavy chain constant region 1; CL is an immunoglobulin light chain constant region; and L1, L2 and L3 are amino acid linkers. In some aspects, VH1 and VL1 specifically bind to CD3, VH2 and VL2 specifically bind to CD28, and VH3 and VL3 specifically bind to CD38. In another aspect, VH1 and VL1 specifically bind to CD3, VH2 and VL2 specifically bind to CD28, and VH3 and VL3 specifically bind to CD19. In another aspect, VH1 and VL1 specifically bind to CD28, VH2 and VL2 specifically bind to CD3, and VH3 and VL3 specifically bind to CD38. In another aspect, VH1 and VL1 specifically bind to CD28, VH2 and VL2 specifically bind to CD3, and VH3 and VL3 specifically bind to CD19. In some aspects, the first polypeptide has a structure represented by VL1-VL2-VH2-VH1-CH1-Fc, VH1-VH2-VL2-VL1-CH1-Fc, VL1-L1-VL2-L2-VH2-L3-VH1-CH1-Fc, VH1-L1-VH2-L2-VL2-L3-VH1-CH1-Fc, VL1-VL2-VH2-VH1-CL-Fc, VH1-VH2-VL2-VL1-CL-Fc, VL1-L1-VL2-L2-VH2-L3-VH1-CL-Fc, or VH1-L1-VH2-L2-VL2-L3-VH1-CL-Fc and a second polypeptide having a structure represented by VL3-VH3-CL-Fc. In some aspects, the first polypeptide has a structure represented by VL1-VL2-VH2-VH1-CH1-Fc, VH1-VH2-VL2-VL1-CH1-Fc, VL1-L1-VL2-L2-VH2-L3-VH1-CH1-Fc, VH1-L1-VH2-L2-VL2-L3-VH1-CH1-Fc, VL1-VL2-VH2-VH1-CL-Fc, VH1-VH2-VL2-VL1-CL-Fc, VL1-L1-VL2-L2-VH2-L3-VH1-CL-Fc, or VH1-L1-VH2-L2-VL2-L3-VH1-CL-Fc and a second polypeptide having a structure represented by VL3-L1-VH3-L2-CL-Fc. In some aspects, the first polypeptide has a structure represented by VL1-VL2-VH2-VH1-CH1-Fc, VH1-VH2-VL2-VL1-CH1-Fc, VL1-L1-VL2-L2-VH2-L3-VH1-CH1-Fc, VH1-L1-VH2-L2-VL2-L3-VH1-CH1-Fc, VL1-VL2-VH2-VH1-CL-Fc, VH1-VH2-VL2-VL1-CL-Fc, VL1-L1-VL2-L2-VH2-L3-VH1-CL-Fc, or VH1-L1-VH2-L2-VL2-L3-VH1-CL-Fc and a second polypeptide having a structure represented by VH3-VL3-CL-Fc. In some aspects, the first polypeptide has a structure represented by VL1-VL2-VH2-VH1-CH1-Fc, VH1-VH2-VL2-VL1-CH1-Fc, VL1-L1-VL2-L2-VH2-L3-VH1-CH1-Fc, VH1-L1-VH2-L2-VL2-L3-VH1-CH1-Fc, VL1-VL2-VH2-VH1-CL-Fc, VH1-VH2-VL2-VL1-CL-Fc, VL1-L1-VL2-L2-VH2-L3-VH1-CL-Fc, or VH1-L1-VH2-L2-VL2-L3-VH1-CL-Fc and a second polypeptide having a structure represented by VH3-L1-VL3-L2-CL-Fc. In some aspects, the first polypeptide has a structure represented by VL1-VL2-VH2-VH1-CH1-Fc, VH1-VH2-VL2-VL1-CH1-Fc, VL1-L1-VL2-L2-VH2-L3-VH1-CH1-Fc, VH1-L1-VH2-L2-VL2-L3-VH1-CH1-Fc, VL1-VL2-VH2-VH1-CL-Fc, VH1-VH2-VL2-VL1-CL-Fc, VL1-L1-VL2-L2-VH2-L3-VH1-CL-Fc, or VH1-L1-VH2-L2-VL2-L3-VH1-CL-Fc and a second polypeptide having a structure represented by VL3-VH3-CH1-Fc. In some aspects, the first polypeptide has a structure represented by VL1-VL2-VH2-VH1-CH1-Fc, VH1-VH2-VL2-VL1-CH1-Fc, VL1-L1-VL2-L2-VH2-L3-VH1-CH1-Fc, VH1-L1-VH2-L2-VL2-L3-VH1-CH1-Fc, VL1-VL2-VH2-VH1-CL-Fc, VH1-VH2-VL2-VL1-CL-Fc, VL1-L1-VL2-L2-VH2-L3-VH1-CL-Fc, or VH1-L1-VH2-L2-VL2-L3-VH1-CL-Fc and a second polypeptide having a structure represented by VL3-L1-VH3-L2-CH1-Fc. In some aspects, the first polypeptide has a structure represented by VL1-VL2-VH2-VH1-CH1-Fc, VH1-VH2-VL2-VL1-CH1-Fc, VL1-L1-VL2-L2-VH2-L3-VH1-CH1-Fc, VH1-L1-VH2-L2-VL2-L3-VH1-CH1-Fc, VL1-VL2-VH2-VH1-CL-Fc, VH1-VH2-VL2-VL1-CL-Fc, VL1-L1-VL2-L2-VH2-L3-VH1-CL-Fc, or VH1-L1-VH2-L2-VL2-L3-VH1-CL-Fc and a second polypeptide having a structure represented by VH3-VL3-CH1-Fc. In some aspects, the first polypeptide has a structure represented by VL1-VL2-VH2-VH1-CH1-Fc, VH1-VH2-VL2-VL1-CH1-Fc, VL1-L1-VL2-L2-VH2-L3-VH1-CH1-Fc, VH1-L1-VH2-L2-VL2-L3-VH1-CH1-Fc, VL1-VL2-VH2-VH1-CL-Fc, VH1-VH2-VL2-VL1-CL-Fc, VL1-L1-VL2-L2-VH2-L3-VH1-CL-Fc, or VH1-L1-VH2-L2-VL2-L3-VH1-CL-Fc and a second polypeptide having a structure represented by VH3-L1-VL3-L2-CH1-Fc. The VL1, VL2, VL3, VH1, VH2, and/or VH3 may specifically bind to A2AR, APRIL, ATPDase, BAFF, BAFFR, BCMA, BlyS, BTK, BTLA, B7DC, B7H1, B7H2, B7H3, B7H4, B7H5, B7H6, B7H7, B7RP1, B7-4, C3, C5, CCL2, CCL3, CCL4, CCL5, CCL7, CCL8, CCL11, CCL15, CCL17, CCL19, CCL20, CCL21, CCL25 CCR3, CCR4, CD3, CD19, CD20, CD24, CD27, CD28, CD38, CD39, CD40, CD40L, CD47, CD52, CD70, CD80, CD86, CD123, CD133, CD137, CD137L, CD160, CD272, CEACAM5, CLEC9, CLEC91, CRTH2, CSF-1, CSF-2, CSF-3, CXCL1, CXCL2, CXCL4, CXCL12, CXCL13, CXCR3, cMet, CTLA4, DLL3, DNGR-1, E-cadherin, EGFR, ENTPD1, EpCAM, FCER1, FCER1A, FCER2, FGFR, FLAP, FOLH1, Gi24, GITR, GITRL, GPR5, HER2, HER3, ICOSL, ICOS, HHLA2, HMGB1, HVEM, IDO, IFNa, IgE, IGF1R, IL2Rbeta, IL1, IL1A, IL1B, IL1F10, IL2, IL4, IL4Ra, IL5, IL5R, IL6, IL7, IL7Ra, IL8, IL9, IL9R, IL10, rhIL10, IL12, IL13, IL13Ra1, IL13Ra2, IL15, IL17, IL17Rb, IL18, IL22, IL23, IL25, IL7, IL33, IL35, ITGB4, ITK, KIR, LAG3, LAMP1, leptin, LPFS2, MHC class II, MUC-1, MUC-16, NCR3LG1, NKG2D, NKp46, NTPDase-1, OX40, OX40L, PD-1, PD-L1, PD-L2, PROM1, S1S2, SIRPalpha, SISP1, SLC, SPG64, ST2, STEAP1, STEAP2, Syk kinase, STEAP1, TROP2, TACI, TDO, T14, TIGIT, TIM3, TLR, TLR2, TLR4, TLR5, TLR9, TMEF1, TNFa, TNFRSF7, Tp55, TREM1, TSLP, TSLPR, TWEAK, VEGF, VISTA, Vstm3, WUCAM, DLL4, TGFbeta, GP100, GPRC5D, CD30 or CD16A. For the avoidance of doubt, all the antigen binding polypeptide complex structures described herein can be combined with any one or more of the targets described herein. Any and all disclosure herein in relation to targets for antigen binding polypeptides of the invention is generally applicable, and applies equally and without reservation to each and every antigen binding polypeptide and antigen binding polypeptide complex described herein. For the avoidance of doubt, the VL1, VL2, VL3, VH1, VH2, and/or VH3 of each and every antigen binding polypeptide and antigen binding polypeptide complex described herein may independently bind to any one of said particularly preferred targets.

[0185] In another aspect, the invention is directed to an antigen binding polypeptide complex (e.g., an antibody or antigen binding fragment thereof) comprising a first polypeptide having a structure represented by VL1-VL2-VH2-VH1-CL-CH1-Fc, VL1-L1-VL2-L2-VH2-L3-VH1-CL-CH1-Fc, VH1-VH2-VL2-VL1-CL-CH1-Fc, VH1-L1-VH2-L2-VL2-L3-VL1-CL-CH1-Fc, VL1-VL2-VH2-VH1-CH1-CL-Fc, VL1-L1-VL2-L2-VH2-L3-VH1-CH1-CL-Fc, VH1-VH2-VL2-VL1-CH1-CL-Fc, or VH1-L1-VH2-L2-VL2-L3-VL1-CH1-CL-Fc; and a second polypeptide having a structure represented by VL3-VH3-Fc, VL3-L1-VH3-Fc, VH3-VL3-Fc, or VH3-L1-VL3-Fc; wherein VL1 is a first immunoglobulin light chain variable region that specifically binds to A2AR, APRIL, ATPDase, BAFF, BAFFR, BCMA, BlyS, BTK, BTLA, B7DC, B17H1, B7H2, B7H3, B7H4, B7H5, B7H6, B7H7, B7RP1, B17-4, C3, C5, CCL2, CCL3, CCL4, CCL5, CCL7, CCL8, CCL11, CCL15, CCL17, CCL19, CCL20, CCL21, CCL25 CCR3, CCR4, CD3, CD19, CD20, CD24, CD27, CD28, CD38, CD39, CD40, CD40L, CD47, CD52, CD70, CD80, CD86, CD123, CD133, CD137, CD137L, CD160, CD272, CEACAM5, CLEC9, CLEC91, CRTH2, CSF-1, CSF-2, CSF-3, CXCL1, CXCL2, CXCL4, CXCL12, CXCL13, CXCR3, cMet, CTLA4, DLL3, DNGR-1, E-cadherin, EGFR, ENTPD1, EpCAM, FCER1, FCER1A, FCER2, FGFR, FLAP, FOLH1, Gi24, GITR, GITRL, GPR5, HER2, HER3, ICOSL, ICOS, HHLA2, HMGB1, HVEM, IDO, IFNa, IgE, IGF1R, IL2Rbeta, IL1, IL1A, IL1B, IL1F10, IL2, IL4, IL4Ra, IL5, IL5R, IL6, IL7, IL7Ra, IL8, IL9, IL9R, IL10, rhIL10, IL12, IL13, IL13Ra1, IL13Ra2, IL15, I17, IL17Rb, IL18, IL22, IL23, IL25, IL7, IL33, IL35, ITGB14, ITK, KIR, LAG3, LAMP1, leptin, LPFS2, MHC class II, MUC-1, MUC-16, NCR3LG1, NKG2D, NKp46, NTPDase-1, OX40, OX40L, PD-1, PD-L1, PD-L2, PROM1, S1S2, SIRPalpha, SISP1, SLC, SPG64, ST2, STEAP1, STEAP2, Syk kinase, STEAP1, TROP2, TACI, TDO, T14, TIGIT, TIM3, TLR, TLR2, TLR4, TLR5, TLR9, TMEF1, TNFa, TNFRSF7, Tp55, TREM1, TSLP, TSLPR, TWEAK, VEGF, VISTA, Vstm3, WUCAM, DLL4, TGFbeta, GP100, GPRC5D, CD30 or CD16A; VL2 is a second immunoglobulin light chain variable region that specifically binds to A2AR, APRIL, ATPDase, BAFF, BAFFR, BCMA, BlyS, BTK, BTLA, B17DC, B17H1, B7H2, B7H3, B7H4, B7H5, B7H6, B7H7, B7RP1, B7-4, C3, C5, CCL2, CCL3, CCL4, CCL5, CCL7, CCL8, CCL11, CCL15, CCL17, CCL19, CCL20, CCL21, CCL25 CCR3, CCR4, CD3, CD19, CD20, CD24, CD27, CD28, CD38, CD39, CD40, CD40L, CD47, CD52, CD70, CD80, CD86, CD123, CD133, CD137, CD137L, CD160, CD272, CEACAM5, CLEC9, CLEC91, CRTH2, CSF-1, CSF-2, CSF-3, CXCL1, CXCL2, CXCL4, CXCL12, CXCL13, CXCR3, cMet, CTLA4, DLL3, DNGR-1, E-cadherin, EGFR, ENTPD1, EpCAM, FCER1, FCER1A, FCER2, FGFR, FLAP, FOLH1, Gi24, GITR, GITRL, GPR5, HER2, HER3, ICOSL, ICOS, HHLA2, HMGB1, HVEM, IDO, IFNa, IgE, IGF1R, IL2Rbeta, IL1, IL1A, IL1B, IL1F10, IL2, IL4, IL4Ra, IL5, IL5R, IL6, IL7, IL7Ra, IL8, IL9, IL9R, IL10, rhIL10, IL12, IL13, IL13Ra1, IL13Ra2, IL15, IL17, IL17Rb, IL18, IL22, IL23, IL25, IL7, IL33, IL35, ITGB4, ITK, KIR, LAG3, LAMP1, leptin, LPFS2, MHC class II, MUC-1, MUC-16, NCR3LG1, NKG2D, NKp46, NTPDase-1, OX40, OX40L, PD-1, PD-L1, PD-L2, PROM1, S152, SIRPalpha, SISP1, SLC, SPG64, ST2, STEAP1, STEAP2, Syk kinase, STEAP1, TROP2, TACI, TDO, T14, TIGIT, TIM3, TLR, TLR2, TLR4, TLR5, TLR9, TMEF1, TNFa, TNFRSF7, Tp55, TREM1, TSLP, TSLPR, TWEAK, VEGF, VISTA, Vstm3, WUCAM, DLL4, TGFbeta, GP100, GPRC5D, CD30 or CD16A; VL3 is a third immunoglobulin light chain variable region that specifically binds to A2AR, APRIL, ATPDase, BAFF, BAFFR, BCMA, BlyS, BTK, BTLA, B7DC, B7H1, B7H2, B7H3, B7H4, B7H5, B7H6, B7H7, B7RP1, B7-4, C3, C5, CCL2, CCL3, CCL4, CCL5, CCL7, CCL8, CCL11, CCL15, CCL17, CCL19, CCL20, CCL21, CCL25 CCR3, CCR4, CD3, CD19, CD20, CD24, CD27, CD28, CD38, CD39, CD40, CD40L, CD47, CD52, CD70, CD80, CD86, CD123, CD133, CD137, CD137L, CD160, CD272, CEACAM5, CLEC9, CLEC91, CRTH2, CSF-1, CSF-2, CSF-3, CXCL1, CXCL2, CXCL4, CXCL12, CXCL13, CXCR3, cMet, CTLA4, DLL3, DNGR-1, E-cadherin, EGFR, ENTPD1, EpCAM, FCER1, FCER1A, FCER2, FGFR, FLAP, FOLH1, Gi24, GITR, GITRL, GPR5, HER2, HER3, ICOSL, ICOS, HHLA2, HMGB1, HVEM, IDO, IFNa, IgE, IGF1R, IL2Rbeta, IL1, IL1A, IL1B, IL1F10, IL2, IL4, IL4Ra, IL5, IL5R, IL6, IL7, IL7Ra, IL8, IL9, IL9R, IL10, rhIL10, IL12, IL13, IL13Ra1, IL13Ra2, IL15, IL17, IL17Rb, IL18, IL22, IL23, IL25, IL7, IL33, IL35, ITGB4, ITK, KIR, LAG3, LAMP1, leptin, LPFS2, MHC class II, MUC-1, MUC-16, NCR3LG1, NKG2D, NKp46, NTPDase-1, OX40, OX40L, PD-1, PD-L1, PD-L2, PROM1, S152, SIRPalpha, SISP1, SLC, SPG64, ST2, STEAP1, STEAP2, Syk kinase, STEAP1, TROP2, TACI, TDO, T14, TIGIT, TIM3, TLR, TLR2, TLR4, TLR5, TLR9, TMEF1, TNFa, TNFRSF7, Tp55, TREM1, TSLP, TSLPR, TWEAK, VEGF, VISTA, Vstm3, WUCAM, DLL4, TGFbeta, GP100, GPRC5D, CD30 or CD16A; VH1 is a first immunoglobulin heavy chain variable region that specifically binds to A2AR, APRIL, ATPDase, BAFF, BAFFR, BCMA, BlyS, BTK, BTLA, B7DC, B7H1, B7H2, B7H3, B7H4, B7H5, B7H6, B7H7, B7RP1, B7-4, C3, C5, CCL2, CCL3, CCL4, CCL5, CCL7, CCL8, CCL11, CCL15, CCL17, CCL19, CCL20, CCL21, CCL25 CCR3, CCR4, CD3, CD19, CD20, CD24, CD27, CD28, CD38, CD39, CD40, CD40L, CD47, CD52, CD70, CD80, CD86, CD123, CD133, CD137, CD137L, CD160, CD272, CEACAM5, CLEC9, CLEC91, CRTH2, CSF-1, CSF-2, CSF-3, CXCL1, CXCL2, CXCL4, CXCL12, CXCL13, CXCR3, cMet, CTLA4, DLL3, DNGR-1, E-cadherin, EGFR, ENTPD1, EpCAM, FCER1, FCER1A, FCER2, FGFR, FLAP, FOLH1, Gi24, GITR, GITRL, GPR5, HER2, HER3, ICOSL, ICOS, HHLA2, HMGB1, HVEM, IDO, IFNa, IgE, IGF1R, IL2Rbeta, IL1, IL1A, IL1B, IL1F10, IL2, IL4, IL4Ra, IL5, IL5R, IL6, IL7, IL7Ra, IL8, IL9, IL9R, IL10, rhIL10, IL12, IL13, IL13Ra1, IL13Ra2, IL15, IL17, IL17Rb, IL18, IL22, IL23, IL25, IL7, IL33, IL35, ITGB4, ITK, KIR, LAG3, LAMP1, leptin, LPFS2, MHC class U, MUC-1, MUC-16, NCR3LG1, NKG2D, NKp46, NTPDase-1, OX40, OX40L, PD-1, PD-L1, PD-L2, PROM1, S152, SIRPalpha, SISP1, SLC, SPG64, ST2, STEAP1, STEAP2, Syk kinase, STEAP1, TROP2, TACI, TDO, T14, TIGIT, TIM3, TLR, TLR2, TLR4, TLR5, TLR9, TMEF1, TNFa, TNFRSF7, Tp55, TREM1, TSLP, TSLPR, TWEAK, VEGF, VISTA, Vstm3, WUCAM, DLL4, TGFbeta, GP100, GPRC5D, CD30 or CD16A; VH2 is a second immunoglobulin heavy chain variable region that specifically binds to A2AR, APRIL, ATPDase, BAFF, BAFFR, BCMA, BlyS, BTK, BTLA, B7DC, B17H1, B17H2, B17H3, B17H4, B7H5, B7H6, B17H7, B7RP1, B17-4, C3, C5, CCL2, CCL3, CCL4, CCL5, CCL7, CCL8, CCL11, CCL15, CCL17, CCL19, CCL20, CCL21, CCL25 CCR3, CCR4, CD3, CD19, CD20, CD24, CD27, CD28, CD38, CD39, CD40, CD40L, CD47, CD52, CD70, CD80, CD86, CD123, CD133, CD137, CD137L, CD160, CD272, CEACAM5, CLEC9, CLEC91, CRTH2, CSF-1, CSF-2, CSF-3, CXCL1, CXCL2, CXCL4, CXCL12, CXCL13, CXCR3, cMet, CTLA4, DLL3, DNGR-1, E-cadherin, EGFR, ENTPD1, EpCAM, FCER1, FCER1A, FCER2, FGFR, FLAP, FOLH1, Gi24, GITR, GITRL, GPR5, HER2, HER3, ICOSL, ICOS, HHLA2, HMGB1, HVEM, IDO, IFNa, IgE, IGF1R, IL2Rbeta, IL1, IL1A, IL1B, IL1F10, IL2, IL4, IL4Ra, IL5, IL5R, IL6, IL7, IL7Ra, IL8, IL9, IL9R, IL10, rhIL10, IL12, IL13, IL13Ra1, IL13Ra2, IL15, IL17, IL17Rb, IL18, IL22, IL23, IL25, IL7, 1L33, IL35, ITGB4, ITK, KIR, LAG3, LAMP1, leptin, LPFS2, MHC class II, MUC-1, MUC-16, NCR3LG1, NKG2D, NKp46, NTPDase-1, OX40, OX40L, PD-1, PD-L1, PD-L2, PROM1, S1S2, SIRPalpha, SISP1, SLC, SPG64, ST2, STEAP1, STEAP2, Syk kinase, STEAP1, TROP2, TACI, TDO, T14, TIGIT, TIM3, TLR, TLR2, TLR4, TLR5, TLR9, TMEF1, TNFa, TNFRSF7, Tp55, TREM1, TSLP, TSLPR, TWEAK, VEGF, VISTA, Vstm3, WUCAM, DLL4, TGFbeta, GP100, GPRC5D, CD30 or CD16A; VH3 is a third immunoglobulin heavy chain variable region that specifically binds to A2AR, APRIL, ATPDase, BAFF, BAFFR, BCMA, BlyS, BTK, BTLA, B7DC, B7H1, B7H2, B7H3, B7H4, B7H5, B7H6, B17H7, B7RP1, B7-4, C3, C5, CCL2, CCL3, CCL4, CCL5, CCL7, CCL8, CCL11, CCL15, CCL17, CCL19, CCL20, CCL21, CCL25 CCR3, CCR4, CD3, CD19, CD20, CD24, CD27, CD28, CD38, CD39, CD40, CD40L, CD47, CD52, CD70, CD80, CD86, CD123, CD133, CD137, CD137L, CD160, CD272, CEACAM5, CLEC9, CLEC91, CRTH2, CSF-1, CSF-2, CSF-3, CXCL1, CXCL2, CXCL4, CXCL12, CXCL13, CXCR3, cMet, CTLA4, DLL3, DNGR-1, E-cadherin, EGFR, ENTPD1, EpCAM, FCER1, FCER1A, FCER2, FGFR, FLAP, FOLH1, Gi24, GITR, GITRL, GPR5, HER2, HER3, ICOSL, ICOS, HHLA2, HMGB1, HVEM, IDO, IFNa, IgE, IGF1R, IL2Rbeta, IL1, IL1A, IL1B, IL1F10, IL2, IL4, IL4Ra, IL5, IL5R, IL6, IL7, IL7Ra, IL8, IL9, IL9R, IL10, rhIL10, IL12, IL13, IL13Ra1, IL13Ra2, IL15, IL17, IL17Rb, IL18, IL22, IL23, IL25, IL7, IL33, IL35, ITGB4, ITK, KIR, LAG3, LAMP1, leptin, LPFS2, MHC class II, MUC-1, MUC-16, NCR3LG1, NKG2D, NKp46, NTPDase-1, OX40, OX40L, PD-1, PD-L1, PD-L2, PROM1, S152, SIRPalpha, SISP1, SLC, SPG64, ST2, STEAP1, STEAP2, Syk kinase, STEAP1, TROP2, TACI, TDO, T14, TIGIT, TIM3, TLR, TLR2, TLR4, TLR5, TLR9, TMEF1, TNFa, TNFRSF7, Tp55, TREM1, TSLP, TSLPR, TWEAK, VEGF, VISTA, Vstm3, WUCAM, DLL4, TGFbeta, GP100, GPRC5D, CD30 or CD16A; Fe is a region comprising an immunoglobulin heavy chain constant region 2 (CH2), an immunoglobulin heavy chain constant region 3 (CH3), and optionally, an immunoglobulin hinge; CH1 is an immunoglobulin heavy chain constant region 1; CL is an immunoglobulin light chain constant region; and L1, L2 and L3 are amino acid linkers. In some aspects, VH1 and VL1 specifically bind to CD3, VH2 and VL2 specifically bind to CD28, and VH3 and VL3 specifically bind to CD38. In another aspect, VH1 and VL1 specifically bind to CD3, VH2 and VL2 specifically bind to CD28, and VH3 and VL3 specifically bind to CD19. In another aspect, VH1 and VL1 specifically bind to CD28, VH2 and VL2 specifically bind to CD3, and VH3 and VL3 specifically bind to CD38. In another aspect, VH1 and VL1 specifically bind to CD28, VH2 and VL2 specifically bind to CD3, and VH3 and VL3 specifically bind to CD19. In some aspects, the first polypeptide has a structure represented by VL1-VL2-VH2-VH1-CL-CH1-Fc, VL1-L1-VL2-L2-VH2-L3-VH1-CL-CH1-Fc, VH1-VH2-VL2-VL1-CL-CH1-Fc, VH1-L1-VH2-L2-VL2-L3-VL1-CL-CH1-Fc, VL1-VL2-VH2-VH1-CH1-CL-Fc, VL1-L1-VL2-L2-VH2-L3-VH1-CH1-CL-Fc, VH1-VH2-VL2-VL1-CH1-CL-Fc, or VH1-L1-VH2-L2-VL2-L3-VL1-CH1-CL-Fc and a second polypeptide having a structure represented by VL3-VH3-Fc. In some aspects, the first polypeptide has a structure represented by VL1-VL2-VH2-VH1-CL-CH1-Fc, VL1-L1-VL2-L2-VH2-L3-VH1-CL-CH1-Fc, VH1-VH2-VL2-VL1-CL-CH1-Fc, VH1-L1-VH2-L2-VL2-L3-VL1-CL-CH1-Fc, VL1-VL2-VH2-VH1-CH1-CL-Fc, VL1-L1-VL2-L2-VH2-L3-VH1-CH1-CL-Fc, VH1-VH2-VL2-VL1-CH1-CL-Fc, or VH1-L1-VH2-L2-VL2-L3-VL1-CH1-CL-Fc and a second polypeptide having a structure represented by VL3-L1-VH3-Fc. In some aspects, the first polypeptide has a structure represented by VL1-VL2-VH2-VH1-CL-CH1-Fc, VL1-L1-VL2-L2-VH2-L3-VH1-CL-CH1-Fc, VH1-VH2-VL2-VL1-CL-CH1-Fc, VH1-L1-VH2-L2-VL2-L3-VL1-CL-CH1-Fc, VL1-VL2-VH2-VH1-CH1-CL-Fc, VL1-L1-VL2-L2-VH2-L3-VH1-CH1-CL-Fc, VH1-VH2-VL2-VL1-CH1-CL-Fc, or VH1-L1-VH2-L2-VL2-L3-VL1-CH1-CL-Fc and a second polypeptide having a structure represented by VH3-VL3-Fc. In some aspects, the first polypeptide has a structure represented by VL1-VL2-VH2-VH1-CL-CH1-Fc, VL1-L1-VL2-L2-VH2-L3-VH1-CL-CH1-Fc, VH1-VH2-VL2-VL1-CL-CH1-Fc, VH1-L1-VH2-L2-VL2-L3-VL1-CL-CH1-Fc, VL1-VL2-VH2-VH1-CH1-CL-Fc, VL1-L1-VL2-L2-VH2-L3-VH1-CH1-CL-Fc, VH1-VH2-VL2-VL1-CH1-CL-Fc, or VH1-L1-VH2-L2-VL2-L3-VL1-CH1-CL-Fc and a second polypeptide having a structure represented by VH3-L1-VL3-Fc. The VL1, VL2, VL3, VH1, VH2, and/or VH3 may specifically bind to A2AR, APRIL, ATPDase, BAFF, BAFFR, BCMA, BlyS, BTK, BTLA, B7DC, B7H1, B7H2, B7H3, B7H4, B7H5, B7H6, B7H7, B7RP1, B7-4, C3, C5, CCL2, CCL3, CCL4, CCL5, CCL7, CCL8, CCL11, CCL15, CCL17, CCL19, CCL20, CCL21, CCL25 CCR3, CCR4, CD3, CD19, CD20, CD24, CD27, CD28, CD38, CD39, CD40, CD40L, CD47, CD52, CD70, CD80, CD86, CD123, CD133, CD137, CD137L, CD160, CD272, CEACAM5, CLEC9, CLEC91, CRTH2, CSF-1, CSF-2, CSF-3, CXCL1, CXCL2, CXCL4, CXCL12, CXCL13, CXCR3, cMet, CTLA4, DLL3, DNGR-1, E-cadherin, EGFR, ENTPD1, EpCAM, FCER1, FCER1A, FCER2, FGFR, FLAP, FOLH1, Gi24, GITR, GITRL, GPR5, HER2, HER3, ICOSL, ICOS, HHLA2, HMGB1, HVEM, IDO, IFNa, IgE, IGF1R, IL2Rbeta, IL1, IL1A, IL1B, IL1F10, IL2, IL4, IL4Ra, IL5, IL5R, IL6, IL7, IL7Ra, IL8, IL9, IL9R, IL10, rhIL10, IL12, IL13, IL13Ra1, IL13Ra2, IL15, IL17, IL17Rb, IL18, IL22, IL23, IL25, IL7, IL33, IL35, ITGB4, ITK, KIR, LAG3, LAMP1, leptin, LPFS2, MHC class II, MUC-1, MUC-16, NCR3LG1, NKG2D, NKp46, NTPDase-1, OX40, OX40L, PD-1, PD-L1, PD-L2, PROM1, S152, SIRPalpha, SISP1, SLC, SPG64, ST2, STEAP1, STEAP2, Syk kinase, STEAP1, TROP2, TACI, TDO, T14, TIGIT, TIM3, TLR, TLR2, TLR4, TLR5, TLR9, TMEF1, TNFa, TNFRSF7, Tp55, TREM1, TSLP, TSLPR, TWEAK, VEGF, VISTA, Vstm3, WUCAM, DLL4, TGFbeta, GP100, GPRC5D, CD30 or CD16A. For the avoidance of doubt, all the antigen binding polypeptide complex structures described herein can be combined with any one or more of the targets described herein. Any and all disclosure herein in relation to targets for antigen binding polypeptides of the invention is generally applicable, and applies equally and without reservation to each and every antigen binding polypeptide and antigen binding polypeptide complex described herein. For the avoidance of doubt, the VL1, VL2, VL3, VH1, VH2, and/or VH3 of each and every antigen binding polypeptide and antigen binding polypeptide complex described herein may independently bind to any one of said particularly preferred targets.

[0186] In another aspect, an antigen binding polypeptide or antigen binding polypeptide complex of the invention comprises a polypeptide having an amino acid sequence having at least 90% identity, at least 95% identity, or 100% identity to one or more of SEQ ID NOs:20-25 and 76. In another aspect, an antigen binding polypeptide or antigen binding polypeptide complex of the invention comprises a first polypeptide having an amino acid sequence having at least 90% identity, at least 95% identity, or 100% identity to one or more of SEQ ID NOs:20-25 and 76, and a second polypeptide having an amino acid sequence having at least 90% identity, at least 95% identity, or 100% identity to one or more of SEQ ID NOs:20-25 and 76. In another aspect, an antigen binding polypeptide or antigen binding polypeptide complex of the invention comprises a first polypeptide having an amino acid sequence having at least 90% identity, at least 95% identity, or 100% identity to two or more of SEQ ID NOs:20-25 and 76, and a second polypeptide having an amino acid sequence having at least 90% identity, at least 95% identity, or 100% identity to one or more of SEQ ID NOs:20-25 and 76. For example, an antigen binding polypeptide or antigen binding polypeptide complex of the invention comprise a polypeptide having an amino acid sequence having at least 90% identity to any one of SEQ ID NOs:20-25 and 76. At least 90% identity may include at least 91%, 92%, 93%, 94%, 95%, 96%, 97%, 98%, 99% or 100% identity to the reference polypeptide sequence. For example, an antigen binding polypeptide or antigen binding polypeptide complex of the invention may comprise a polypeptide having an amino acid sequence of any one of SEQ ID NOs:20-25 and 76.

[0187] In another aspect, an antigen binding polypeptide or antigen binding polypeptide complex of the invention comprises a polypeptide having an amino acid sequence having at least 90% identity, at least 95% identity, or 100% identity to one or more of SEQ ID NOs:26-31 and 77. In another aspect, an antigen binding polypeptide or antigen binding polypeptide complex of the invention comprises a first polypeptide having an amino acid sequence having at least 90% identity, at least 95% identity, or 100% identity to one or more of SEQ ID NOs:26-31 and 77, and a second polypeptide having an amino acid sequence having at least 90% identity, at least 95% identity, or 100% identity to one or more of SEQ ID NOs:26-31 and 77. In another aspect, an antigen binding polypeptide or antigen binding polypeptide complex of the invention comprises a first polypeptide having an amino acid sequence having at least 90% identity, at least 95% identity, or 100% identity to two or more of SEQ ID NOs:26-31 and 77, and a second polypeptide having an amino acid sequence having at least 90% identity, at least 95% identity, or 100% identity to one or more of SEQ ID NOs:26-31 and 77. For example, an antigen binding polypeptide or antigen binding polypeptide complex of the invention comprise a polypeptide having an amino acid sequence having at least 90% identity to any one of SEQ ID NOs:26-31 and 77. At least 90% identity may include at least 91%, 92%, 93%, 94%, 95%, 96%, 97%, 98%, 99% or 100% identity to the reference polypeptide sequence. For example, an antigen binding polypeptide or antigen binding polypeptide complex of the invention may comprise a polypeptide having an amino acid sequence of any one of SEQ ID NOs:26-31 and 77.

[0188] In another aspect, an antigen binding polypeptide or antigen binding polypeptide complex of the invention comprises a polypeptide having an amino acid sequence having at least 90% identity, at least 95% identity, or 100% identity to one or more of SEQ ID NOs:20-25 and 76 and a polypeptide having an amino acid sequence having polypeptide having at least 90% identity, at least 95% identity or 100% identity to one or more of SEQ ID NOs:26-31 and 77. In another aspect, an antigen binding polypeptide or antigen binding polypeptide complex of the invention comprises a first polypeptide having an amino acid sequence having at least 90% identity, at least 95% identity, or 100% identity to two or more of SEQ ID NOs:20-25 and 76 and an amino acid sequence having at least 90% identity, at least 95% identity or 100% identity to two or more of SEQ ID NOs:26-31 and 77, and a second polypeptide having an amino acid sequence having at least 90% identity, at least 95% identity, or 100% identity to one or more of SEQ ID NOs:20-25 and 76 and an amino acid sequence having at least 90% identity, at least 95% identity or 100% identity to one or more of SEQ ID NOs:26-31 and 77. For example, an antigen binding polypeptide or antigen binding polypeptide complex of the invention comprise a polypeptide having an amino acid sequence having at least 90% identity to any one of SEQ ID NOs:20-25 and 76. At least 90% identity may include at least 91%, 92%, 93%, 94%, 95%, 96%, 97%, 98%, 99% or 100% identity to the reference polypeptide sequence. For example, an antigen binding polypeptide or antigen binding polypeptide complex of the invention may comprise a polypeptide having an amino acid sequence of any one of SEQ ID NOs:20-25 and 76. For example, an antigen binding polypeptide or antigen binding polypeptide complex of the invention comprise a polypeptide having an amino acid sequence having at least 90% identity to any one of SEQ ID NOs:26-31 and 77. At least 90% identity may include at least 91%, 92%, 93%, 94%, 95%, 96%, 97%, 98%, 99% or 100% identity to the reference polypeptide sequence. For example, an antigen binding polypeptide or antigen binding polypeptide complex of the invention may comprise a polypeptide having an amino acid sequence of any one of SEQ ID NOs:26-31 and 77.

[0189] In another aspect, an antigen binding polypeptide or antigen binding polypeptide complex of the invention comprises a polypeptide having an amino acid sequence having at least 90% identity, at least 95% identity, or 100% identity to one or more of SEQ ID NOs:32-41, 58-66, 78-92, 673, 675, 677, 679, 681, 683, 685, 687, 689, 691, 693 and 695, or a polypeptide having an amino acid sequence having at least 90% identity, at least 95% identity, or 100% identity to the amino acid sequence of SEQ ID NOs:32 or 33 that does not contain the eight histidine residues at the C-terminus. In another aspect, an antigen binding polypeptide or antigen binding polypeptide complex of the invention comprises a first polypeptide having an amino acid sequence having at least 90% identity, at least 95% identity, or 100% identity to one or more of SEQ ID NOs:32-41, 58-66, 91 and 92 or a polypeptide having an amino acid sequence having at least 90% identity, at least 95% identity, or 100% identity to the amino acid sequence of SEQ ID NOs:32 or 33 that does not contain the eight histidine residues at the C-terminus; and a second polypeptide having an amino acid sequence having at least 90% identity, at least 95% identity, or 100% identity to one or more of SEQ ID NOs:78-92. For example, an antigen binding polypeptide or antigen binding polypeptide complex of the invention comprise a polypeptide having an amino acid sequence having at least 90% identity to any one of SEQ ID NOs: 32-41, 58-66, 78-92, 673, 675, 677, 679, 681, 683, 685, 687, 689, 691, 693 and 695, or a polypeptide having an amino acid sequence having at least 90% identity to the amino acid sequence of SEQ ID NOs:32 or 33. At least 90% identity may include at least 91%, 92%, 93%, 94%, 95%, 96%, 97%, 98%, 99% or 100% identity to the reference polypeptide sequence. For example, an antigen binding polypeptide or antigen binding polypeptide complex of the invention may comprise a polypeptide having an amino acid sequence of any one of SEQ ID NOs: 32-41, 58-66, 78-92, 673, 675, 677, 679, 681, 683, 685, 687, 689, 691, 693 and 695, or a polypeptide having an amino acid sequence of SEQ ID NOs:32 or 33. For example, an antigen binding polypeptide or antigen binding polypeptide complex of the invention comprise a polypeptide having an amino acid sequence having at least 90% identity to any one of SEQ ID NOs: 32-41, 58-66, 91 and 92 or a polypeptide having an amino acid sequence having at least 90% identity to the amino acid sequence of SEQ ID NOs:32 or 33. At least 90% identity may include at least 91%, 92%, 93%, 94%, 95%, 96%, 97%, 98%, 99% or 100% identity to the reference polypeptide sequence. For example, an antigen binding polypeptide or antigen binding polypeptide complex of the invention may comprise a polypeptide having an amino acid sequence of any one of SEQ ID NOs: 32-41, 58-66, 91 and 92 or a polypeptide having an amino acid sequence of SEQ ID NOs:32 or 33.

[0190] In another aspect, an antigen binding polypeptide or antigen binding polypeptide complex of the invention comprises a polypeptide encoded by a polynucleotide having at least 90% identity, at least 95% identity, or 100% identity to one or more of SEQ ID NOs:42-51, 67-75, 93-107, 674, 676, 678, 680, 682, 684, 686, 688, 690, 692, 694 and 696. In another aspect, an antigen binding polypeptide or antigen binding polypeptide complex of the invention comprises a first polypeptide encoded by a polynucleotide having at least 90% identity, at least 95% identity, or 100% identity to one or more of SEQ ID NOs:42-51, 67-75, 106 and 107; and a second polypeptide encoded by a polynucleotide having at least 90% identity, at least 95% identity, or 100% identity to one or more of SEQ ID NOs:93-107. For example, an antigen binding polypeptide or antigen binding polypeptide complex of the invention comprise a polypeptide having an amino acid sequence having at least 90% identity to any one of SEQ ID NOs: 42-51, 67-75, 93-107, 674, 676, 678, 680, 682, 684, 686, 688, 690, 692, 694 and 696. At least 90% identity may include at least 91%, 92%, 93%, 94%, 95%, 96%, 97%, 98%, 99% or 100% identity to the reference polypeptide sequence. For example, an antigen binding polypeptide or antigen binding polypeptide complex of the invention may comprise a polypeptide having an amino acid sequence of any one of SEQ ID NOs: 42-51, 67-75, 93-107, 674, 676, 678, 680, 682, 684, 686, 688, 690, 692, 694 and 696.

[0191] In another aspect, VH1 comprises a CDR1 comprising SEQ ID NO:108 or a sequence having at least 90% identity or at least 95% identity to SEQ ID NO:108; a CDR2 comprising SEQ ID NO:109 or a sequence having at least 90% identity or at least 95% identity to SEQ ID NO:109; and a CDR3 comprising SEQ ID NO:110 or a sequence having at least 90% identity or at least 95% identity to SEQ ID NO:110; and VL1 comprises a CDR1 comprising SEQ ID NO:111 or a sequence having at least 90% identity or at least 95% identity to SEQ ID NO:111; a CDR2 comprising SEQ ID NO:112 or a sequence having at least 90% identity or 95% identity to SEQ ID NO: 112; and a CDR3 comprising SEQ ID NO:113 or a sequence having at least 90% identity or at least 95% identity to SEQ ID NO:113. For example, VH1 may comprise a CDR1 comprising an amino acid sequence having at least 90% identity to SEQ ID NO:108; a CDR2 comprising an amino acid sequence having at least 90% identity to SEQ ID NO:109; and/or a CDR3 comprising an amino acid sequence having at least 90% identity to SEQ ID NO: 110; VL1 may comprise a CDR1 comprising an amino acid sequence having at least 90% identity to SEQ ID NO:110; CDR2 comprising an amino acid sequence having at least 90% identity to SEQ ID NO:112; and/or CDR3 comprising an amino acid sequence having at least 90% identity to SEQ ID NO:113. At least 90% identity may include at least 91%, 92%, 93%, 94%, 95%, 96%, 97%, 98%, 99% or 100% identity to the reference polypeptide sequence. For example, VH1 may comprise a CDR1 comprising the amino acid sequence of SEQ ID NO:108; CDR2 comprising the amino acid sequence of SEQ ID NO:109; and/or CDR3 comprising the amino acid sequence of SEQ ID NO:110; VL1 may comprise a CDR1 comprising the amino acid sequence of SEQ ID NO: 112; CDR2 comprising the amino acid sequence of SEQ ID NO:26; and/or CDR3 comprising the amino acid sequence of SEQ ID NO: 113.

[0192] In another aspect, VH2 comprises a CDR1 comprising SEQ ID NO:108 or a sequence having at least 90% identity or at least 95% identity to SEQ ID NO:108; a CDR2 comprising SEQ ID NO:109 or a sequence having at least 90% identity or at least 95% identity to SEQ ID NO:109; and a CDR3 comprising SEQ ID NO:110 or a sequence having at least 90% identity or at least 95% identity to SEQ ID NO:110; and VL2 comprises a CDR1 comprising SEQ ID NO:111 or a sequence having at least 90% identity or at least 95% identity to SEQ ID NO:111; a CDR2 comprising SEQ ID NO:112 or a sequence having at least 90% identity or 95% identity to SEQ ID NO: 112; and a CDR3 comprising SEQ ID NO:113 or a sequence having at least 90% identity or at least 95% identity to SEQ ID NO:113. For example, VH2 may comprise a CDR1 comprising an amino acid sequence having at least 90% identity to SEQ ID NO:108; CDR2 comprising an amino acid sequence having at least 90% identity to SEQ ID NO:109; and/or CDR3 comprising an amino acid sequence having at least 90% identity to SEQ ID NO:110; and VL2 may comprise a CDR1 comprising an amino acid sequence having at least 90% identity to SEQ ID NO:111; CDR2 comprising an amino acid sequence having at least 90% identity to SEQ ID NO: 112; and CDR3 comprising an amino acid sequence having at least 90% identity to SEQ ID NO: 113. At least 90% identity may include at least 91%, 92%, 93%, 94%, 95%, 96%, 97%, 98%, 99% or 100% identity to the reference polypeptide sequence. For example, VH2 may comprise a CDR1 comprising the amino acid sequence of SEQ ID NO:108; CDR2 comprising the amino acid sequence of SEQ ID NO:109; and/or CDR3 comprising the amino acid sequence of SEQ ID NO:110. For example, VL2 may comprise a CDR1 comprising the amino acid sequence of SEQ ID NO:111; CDR2 comprising the amino acid sequence of SEQ ID NO:112; and/or CDR3 comprising the amino acid sequence of SEQ ID NO: 112.

[0193] In another aspect, VH1 comprises a CDR1 comprising SEQ ID NO: 114 or a sequence having at least 90% identity or at least 95% identity to SEQ ID NO:114; a CDR2 comprising SEQ ID NO:115 or a sequence having at least 90% identity or at least 95% identity to SEQ ID NO: 115; and a CDR3 comprising SEQ ID NO: 116 or a sequence having at least 90% identity or at least 95% identity to SEQ ID NO:116; and VL1 comprises a CDR1 comprising SEQ ID NO:117 or a sequence having at least 90% identity or at least 95% identity to SEQ ID NO:117; a CDR2 comprising SEQ ID NO: 118 or a sequence having at least 90% identity or 95% identity to SEQ ID NO: 118; and a CDR3 comprising SEQ ID NO:119 or a sequence having at least 90% identity or at least 95% identity to SEQ ID NO:119. For example, VH1 may comprise a CDR1 comprising an amino acid sequence having at least 90% identity to SEQ ID NO: 114; CDR2 comprising an amino acid sequence having at least 90% identity to SEQ ID NO:115; and/or CDR3 comprising an amino acid sequence having at least 90% identity to SEQ ID NO: 116; VL1 may comprise a CDR1 comprising an amino acid sequence having at least 90% identity to SEQ ID NO:117; CDR2 comprising an amino acid sequence having at least 90% identity to SEQ ID NO:118; and/or CDR3 comprising an amino acid sequence having at least 90% identity to SEQ ID NO: 119. At least 90% identity may include at least 91%, 92%, 93%, 94%, 95%, 96%, 97%, 98%, 99% or 100% identity to the reference polypeptide sequence. For example, VH1 may comprise a CDR1 comprising the amino acid sequence of SEQ ID NO:114; CDR2 comprising the amino acid sequence of SEQ ID NO:115; and/or CDR3 comprising the amino acid sequence of SEQ ID NO: 116. For example, VL1 may comprise a CDR1 comprising the amino acid sequence of SEQ ID NO:117; CDR2 comprising the amino acid sequence of SEQ ID NO:118; and/or CDR3 comprising the amino acid sequence of SEQ ID NO: 119.

[0194] In another aspect, VH2 comprises a CDR1 comprising SEQ ID NO: 114 or a sequence having at least 90% identity or at least 95% identity to SEQ ID NO:114; a CDR2 comprising SEQ ID NO:115 or a sequence having at least 90% identity or at least 95% identity to SEQ ID NO: 115; and a CDR3 comprising SEQ ID NO: 116 or a sequence having at least 90% identity or at least 95% identity to SEQ ID NO:116; and VL2 comprises a CDR1 comprising SEQ ID NO:117 or a sequence having at least 90% identity or at least 95% identity to SEQ ID NO:117; a CDR2 comprising SEQ ID NO: 118 or a sequence having at least 90% identity or 95% identity to SEQ ID NO: 118; and a CDR3 comprising SEQ ID NO:119 or a sequence having at least 90% identity or at least 95% identity to SEQ ID NO:119. For example, VH2 may comprise a CDR1 comprising an amino acid sequence having at least 90% identity to SEQ ID NO: 114; CDR2 comprising an amino acid sequence having at least 90% identity to SEQ ID NO:115; and/or CDR3 comprising an amino acid sequence having at least 90% identity to SEQ ID NO: 116; VL2 may comprise a CDR1 comprising an amino acid sequence having at least 90% identity to SEQ ID NO:117; CDR2 comprising an amino acid sequence having at least 90% identity to SEQ ID NO:118; and/or CDR3 comprising an amino acid sequence having at least 90% identity to SEQ ID NO: 119. At least 90% identity may include at least 91%, 92%, 93%, 94%, 95%, 96%, 97%, 98%, 99% or 100% identity to the reference polypeptide sequence. For example, VH2 may comprise a CDR1 comprising the amino acid sequence of SEQ ID NO:114; CDR2 comprising the amino acid sequence of SEQ ID NO:115; and/or CDR3 comprising the amino acid sequence of SEQ ID NO:116. For example, VL2 may comprise a CDR1 comprising the amino acid sequence of SEQ ID NO:117; CDR2 comprising the amino acid sequence of SEQ ID NO:118; and/or CDR3 comprising the amino acid sequence of SEQ ID NO: 119.

[0195] In another aspect, the VH1 of an antigen binding polypeptide or antigen binding polypeptide complex of the invention comprises a CDR1 comprising SEQ ID NO:52 or a sequence having at least 90% identity or at least 95% identity to SEQ ID NO:52; a CDR2 comprising SEQ ID NO:53 or a sequence having at least 90% identity or at least 95% identity to SEQ ID NO:53; and a CDR3 comprising SEQ ID NO:54 or a sequence having at least 90% identity or at least 95% identity to SEQ ID NO:54; and the VL1 of an antigen binding polypeptide or antigen binding polypeptide complex of the invention comprises a CDR1 comprising SEQ ID NO:55 or a sequence having at least 90% identity or at least 95% identity to SEQ ID NO:55; a CDR2 comprising SEQ ID NO:56 or a sequence having at least 90% identity or 95% identity to SEQ ID NO:56; and a CDR3 comprising SEQ ID NO:57 or a sequence having at least 90% identity or at least 95% identity to SEQ ID NO:57. For example, VH1 may comprise a CDR1 comprising an amino acid sequence having at least 90% identity to SEQ ID NO:52; CDR2 comprising an amino acid sequence having at least 90% identity to SEQ ID NO:53; and/or CDR3 comprising an amino acid sequence having at least 90% identity to SEQ ID NO:54; VL1 may comprise a CDR1 comprising an amino acid sequence having at least 90% identity to SEQ ID NO:55; CDR2 comprising an amino acid sequence having at least 90% identity to SEQ ID NO:56; and/or CDR3 comprising an amino acid sequence having at least 90% identity to SEQ ID NO:57. At least 90% identity may include at least 91%, 92%, 93%, 94%, 95%, 96%, 97%, 98%, 99% or 100% identity to the reference polypeptide sequence. For example, VH1 may comprise a CDR1 comprising the amino acid sequence of SEQ ID NO:52; CDR2 comprising the amino acid sequence of SEQ ID NO:53; and/or CDR3 comprising the amino acid sequence of SEQ ID NO:54. For example, VL1 may comprise a CDR1 comprising the amino acid sequence of SEQ ID NO:55; CDR2 comprising the amino acid sequence of SEQ ID NO:56; and/or CDR3 comprising the amino acid sequence of SEQ ID NO:57.

[0196] In another aspect, the VH2 of an antigen binding polypeptide or antigen binding polypeptide complex of the invention comprises a CDR1 comprising SEQ ID NO:52 or a sequence having at least 90% identity or at least 95% identity to SEQ ID NO:52; a CDR2 comprising SEQ ID NO:53 or a sequence having at least 90% identity or at least 95% identity to SEQ ID NO:53; and a CDR3 comprising SEQ ID NO:54 or a sequence having at least 90% identity or at least 95% identity to SEQ ID NO:54; and the VL2 of an antigen binding polypeptide or antigen binding polypeptide complex of the invention comprises a CDR1 comprising SEQ ID NO:55 or a sequence having at least 90% identity or at least 95% identity to SEQ ID NO:55; a CDR2 comprising SEQ ID NO:56 or a sequence having at least 90% identity or 95% identity to SEQ ID NO:56; and a CDR3 comprising SEQ ID NO:57 or a sequence having at least 90% identity or at least 95% identity to SEQ ID NO:57. For example, VH2 may comprise a CDR1 comprising an amino acid sequence having at least 90% identity to SEQ ID NO:52; CDR2 comprising an amino acid sequence having at least 90% identity to SEQ ID NO:53; and/or CDR3 comprising an amino acid sequence having at least 90% identity to SEQ ID NO:54; VL2 may comprise a CDR1 comprising an amino acid sequence having at least 90% identity to SEQ ID NO:55; CDR2 comprising an amino acid sequence having at least 90% identity to SEQ ID NO:56; and/or CDR3 comprising an amino acid sequence having at least 90% identity to SEQ ID NO:57. At least 90% identity may include at least 91%, 92%, 93%, 94%, 95%, 96%, 97%, 98%, 99% or 100% identity to the reference polypeptide sequence. For example, VH2 may comprise a CDR1 comprising the amino acid sequence of SEQ ID NO:52; CDR2 comprising the amino acid sequence of SEQ ID NO:53; and/or CDR3 comprising the amino acid sequence of SEQ ID NO:54. For example, VL2 may comprise a CDR1 comprising the amino acid sequence of SEQ ID NO:55; CDR2 comprising the amino acid sequence of SEQ ID NO:56; and/or CDR3 comprising the amino acid sequence of SEQ ID NO:57.

[0197] In another aspect, VH1 comprises a CDR1 comprising SEQ ID NO:120 or a sequence having at least 90% identity or at least 95% identity to SEQ ID NO:120; a CDR2 comprising SEQ ID NO:121 or a sequence having at least 90% identity or at least 95% identity to SEQ ID NO:121; and a CDR3 comprising SEQ ID NO:122 or a sequence having at least 90% identity or at least 95% identity to SEQ ID NO:122; and VL1 comprises a CDR1 comprising SEQ ID NO:123 or a sequence having at least 90% identity or at least 95% identity to SEQ ID NO:123; a CDR2 comprising SEQ ID NO:124 or a sequence having at least 90% identity or 95% identity to SEQ ID NO:124; and a CDR3 comprising SEQ ID NO:125 or a sequence having at least 90% identity or at least 95% identity to SEQ ID NO:125. For example, VH1 may comprise a CDR1 comprising an amino acid sequence having at least 90% identity to SEQ ID NO:120; CDR2 comprising an amino acid sequence having at least 90% identity to SEQ ID NO:121; and/or CDR3 comprising an amino acid sequence having at least 90% identity to SEQ ID NO:122; VL1 may comprise a CDR1 comprising an amino acid sequence having at least 90% identity to SEQ ID NO:123; CDR2 comprising an amino acid sequence having at least 90% identity to SEQ ID NO:124; and/or CDR3 comprising an amino acid sequence having at least 90% identity to SEQ ID NO:125. At least 90% identity may include at least 91%, 92%, 93%, 94%, 95%, 96%, 97%, 98%, 99% or 100% identity to the reference polypeptide sequence. For example, VH1 may comprise a CDR1 comprising the amino acid sequence of SEQ ID NO:120; CDR2 comprising the amino acid sequence of SEQ ID NO:121; and/or CDR3 comprising the amino acid sequence of SEQ ID NO:122. For example, VL1 may comprise a CDR1 comprising the amino acid sequence of SEQ ID NO:123; CDR2 comprising the amino acid sequence of SEQ ID NO:124; and/or CDR3 comprising the amino acid sequence of SEQ ID NO:125.

[0198] In another aspect, VH2 comprises a CDR1 comprising SEQ ID NO:120 or a sequence having at least 90% identity or at least 95% identity to SEQ ID NO:120; a CDR2 comprising SEQ ID NO:121 or a sequence having at least 90% identity or at least 95% identity to SEQ ID NO:121; and a CDR3 comprising SEQ ID NO:122 or a sequence having at least 90% identity or at least 95% identity to SEQ ID NO:122; and VL2 comprises a CDR1 comprising SEQ ID NO:123 or a sequence having at least 90% identity or at least 95% identity to SEQ ID NO:123; a CDR2 comprising SEQ ID NO:124 or a sequence having at least 90% identity or 95% identity to SEQ ID NO:124; and a CDR3 comprising SEQ ID NO:125 or a sequence having at least 90% identity or at least 95% identity to SEQ ID NO:125. For example, VH2 may comprise a CDR1 comprising an amino acid sequence having at least 90% identity to SEQ ID NO:120; CDR2 comprising an amino acid sequence having at least 90% identity to SEQ ID NO:121; and/or CDR3 comprising an amino acid sequence having at least 90% identity to SEQ ID NO:122; VL2 may comprise a CDR1 comprising an amino acid sequence having at least 90% identity to SEQ ID NO:123; CDR2 comprising an amino acid sequence having at least 90% identity to SEQ ID NO:124; and/or CDR3 comprising an amino acid sequence having at least 90% identity to SEQ ID NO:125. At least 90% identity may include at least 91%, 92%, 93%, 94%, 95%, 96%, 97%, 98%, 99% or 100% identity to the reference polypeptide sequence. For example, VH2 may comprise a CDR1 comprising the amino acid sequence of SEQ ID NO:120; CDR2 comprising the amino acid sequence of SEQ ID NO:121; and/or CDR3 comprising the amino acid sequence of SEQ ID NO:122. For example, VL2 may comprise a CDR1 comprising the amino acid sequence of SEQ ID NO:123; CDR2 comprising the amino acid sequence of SEQ ID NO:124; and/or CDR3 comprising the amino acid sequence of SEQ ID NO:125.

[0199] In another aspect, VH1 comprises a CDR1 comprising SEQ ID NO:126 or a sequence having at least 90% identity or at least 95% identity to SEQ ID NO:126; a CDR2 comprising SEQ ID NO:127 or a sequence having at least 90% identity or at least 95% identity to SEQ ID NO:127; and a CDR3 comprising SEQ ID NO:128 or a sequence having at least 90% identity or at least 95% identity to SEQ ID NO:128; and VL1 comprises a CDR1 comprising SEQ ID NO:129 or a sequence having at least 90% identity or at least 95% identity to SEQ ID NO:129; a CDR2 comprising SEQ ID NO:130 or a sequence having at least 90% identity or 95% identity to SEQ ID NO:130; and a CDR3 comprising SEQ ID NO:131 or a sequence having at least 90% identity or at least 95% identity to SEQ ID NO:131. For example, VH1 may comprise a CDR1 comprising an amino acid sequence having at least 90% identity to SEQ ID NO:126; CDR2 comprising an amino acid sequence having at least 90% identity to SEQ ID NO:127; and/or CDR3 comprising an amino acid sequence having at least 90% identity to SEQ ID NO:128; VL1 may comprise a CDR1 comprising an amino acid sequence having at least 90% identity to SEQ ID NO:129; CDR2 comprising an amino acid sequence having at least 90% identity to SEQ ID NO:130; and/or CDR3 comprising an amino acid sequence having at least 90% identity to SEQ ID NO:131. At least 90% identity may include at least 91%, 92%, 93%, 94%, 95%, 96%, 97%, 98%, 99% or 100% identity to the reference polypeptide sequence. For example, VH1 may comprise a CDR1 comprising the amino acid sequence of SEQ ID NO:126; CDR2 comprising the amino acid sequence of SEQ ID NO:127; and/or CDR3 comprising the amino acid sequence of SEQ ID NO:128. For example, VL1 may comprise a CDR1 comprising the amino acid sequence of SEQ ID NO:129; CDR2 comprising the amino acid sequence of SEQ ID NO:130; and/or CDR3 comprising the amino acid sequence of SEQ ID NO:131.

[0200] In another aspect, VH2 comprises a CDR1 comprising SEQ ID NO:126 or a sequence having at least 90% identity or at least 95% identity to SEQ ID NO:126; a CDR2 comprising SEQ ID NO:127 or a sequence having at least 90% identity or at least 95% identity to SEQ ID NO:127; and a CDR3 comprising SEQ ID NO:128 or a sequence having at least 90% identity or at least 95% identity to SEQ ID NO:128; and VL2 comprises a CDR1 comprising SEQ ID NO:129 or a sequence having at least 90% identity or at least 95% identity to SEQ ID NO:129; a CDR2 comprising SEQ ID NO:130 or a sequence having at least 90% identity or 95% identity to SEQ ID NO:130; and a CDR3 comprising SEQ ID NO:131 or a sequence having at least 90% identity or at least 95% identity to SEQ ID NO:131. For example, VH2 may comprise a CDR1 comprising an amino acid sequence having at least 90% identity to SEQ ID NO:126; CDR2 comprising an amino acid sequence having at least 90% identity to SEQ ID NO:127; and/or CDR3 comprising an amino acid sequence having at least 90% identity to SEQ ID NO:128; VL2 may comprise a CDR1 comprising an amino acid sequence having at least 90% identity to SEQ ID NO:129; CDR2 comprising an amino acid sequence having at least 90% identity to SEQ ID NO:130; and/or CDR3 comprising an amino acid sequence having at least 90% identity to SEQ ID NO:131. At least 90% identity may include at least 91%, 92%, 93%, 94%, 95%, 96%, 97%, 98%, 99% or 100% identity to the reference polypeptide sequence. For example, VH2 may comprise a CDR1 comprising the amino acid sequence of SEQ ID NO:126; CDR2 comprising the amino acid sequence of SEQ ID NO:127; and/or CDR3 comprising the amino acid sequence of SEQ ID NO:128. For example, VL2 may comprise a CDR1 comprising the amino acid sequence of SEQ ID NO:129; CDR2 comprising the amino acid sequence of SEQ ID NO:130; and/or CDR3 comprising the amino acid sequence of SEQ ID NO:131.

[0201] In some aspects, the antigen binding polypeptide complex of the invention specifically bind to an HIV protein. The HIV protein specifically bound by the antigen binding polypeptide complex of the invention may be selected from: Env, gp160, gp120, gp41, p17, p24, p7, p55, p66, p31, Nef, Tat, Rev, Vif, Vpr and Vpu. In some aspects, the antigen binding polypeptide complex specifically binds at least one epitope on at least HIV protein selected from: Env, gp160, gp120, gp41, p17, p24, p7, p55, p66, p31, Nef, Tat, Rev, Vif, Vpr and Vpu. In some aspects, the antigen binding polypeptide comprised within the antigen binding complex may comprise a VL1, VL2, VL3, VL4, VL5, VL6, VH1, VH2, VH3, VH4, VH5 and/or VH6 that specifically binds to one or more of: Env, gp160, gp120, gp41, p17, p24, p7, p55, p66, p31, Nef, Tat, Rev, Vif, Vpr and Vpu. For example, the polypeptide comprised within the antigen binding complex may comprise a VL1 that specifically binds to Env, gp160, gp120, gp41, p17, p24, p7, p55, p66, p31, Nef, Tat, Rev, Vif, Vpr and Vpu. For example, the VL1 may specifically bind to Env. For example, the VL1 may specifically bind to gp160. For example, the VL1 may specifically bind to gp120. For example, the VL1 may specifically bind to gp41. For example, the VL1 may specifically bind to p17. For example, the VL1 may specifically bind to p24. For example, the VL1 may specifically bind to p7. For example, the VL1 may specifically bind to p55. For example, the VL1 may specifically bind to p66. For example, the VL1 may specifically bind to p31. For example, the VL1 may specifically bind to Nef. For example, the VL1 may specifically bind to Tat. For example, the VL1 may specifically bind to Rev. For example, the VL1 may specifically bind to Vif. For example, the VL1 may specifically bind to Vpr. or example, the VL1 may specifically bind to Vpu. For example, the antigen binding polypeptide or polypeptide comprised within the antigen binding complex may comprise a VL2 that specifically binds to Env, gp160, gp120, gp41, p17, p24, p7, p55, p66, p31, Nef, Tat, Rev, Vif, Vpr and Vpu. For example, the VL2 may specifically bind to Env. For example, the VL2 may specifically bind to gp160. For example, the VL2 may specifically bind to gp120. For example, the VL2 may specifically bind to gp41. For example, the VL2 may specifically bind to p17. For example, the VL2 may specifically bind to p24. For example, the VL2 may specifically bind to p7. For example, the VL2 may specifically bind to p55. For example, the VL2 may specifically bind to p66. For example, the VL2 may specifically bind to p31. For example, the VL2 may specifically bind to Nef. For example, the VL2 may specifically bind to Tat. For example, the VL2 may specifically bind to Rev. For example, the VL2 may specifically bind to Vif. For example, the VL2 may specifically bind to Vpr. or example, the VL2 may specifically bind to Vpu. For example, the antigen binding polypeptide or polypeptide comprised within the antigen binding complex may comprise a VL3 that specifically binds to Env, gp160, gp120, gp41, p17, p24, p7, p55, p66, p31, Nef, Tat, Rev, Vif, Vpr and Vpu. For example, the VL3 may specifically bind to Env. For example, the VL3 may specifically bind to gp160. For example, the VL3 may specifically bind to gp120. For example, the VL3 may specifically bind to gp41. For example, the VL3 may specifically bind to p17. For example, the VL3 may specifically bind to p24. For example, the VL3 may specifically bind to p7. For example, the VL3 may specifically bind to p55. For example, the VL3 may specifically bind to p66. For example, the VL3 may specifically bind to p31. For example, the VL3 may specifically bind to Nef. For example, the VL3 may specifically bind to Tat. For example, the VL3 may specifically bind to Rev. For example, the VL3 may specifically bind to Vif. For example, the VL3 may specifically bind to Vpr. or example, the VL3 may specifically bind to Vpu. For example, the antigen binding polypeptide or polypeptide comprised within the antigen binding complex may comprise a VL4 that specifically binds to Env, gp160, gp120, gp41, p17, p24, p7, p55, p66, p31, Nef, Tat, Rev, Vif, Vpr and Vpu. For example, the VL4 may specifically bind to Env. For example, the VL4 may specifically bind to gp160. For example, the VL4 may specifically bind to gp120. For example, the VL4 may specifically bind to gp41. For example, the VL4 may specifically bind to p17. For example, the VL4 may specifically bind to p24. For example, the VL4 may specifically bind to p7. For example, the VL4 may specifically bind to p55. For example, the VL4 may specifically bind to p66. For example, the VL4 may specifically bind to p31. For example, the VL4 may specifically bind to Nef. For example, the VL4 may specifically bind to Tat. For example, the VL4 may specifically bind to Rev. For example, the VL4 may specifically bind to Vif. For example, the VL4 may specifically bind to Vpr. or example, the VL4 may specifically bind to Vpu. For example, the antigen binding polypeptide or polypeptide comprised within the antigen binding complex may comprise a VL5 that specifically binds to Env, gp160, gp120, gp41, p17, p24, p7, p55, p66, p31, Nef, Tat, Rev, Vif, Vpr and Vpu. For example, the VL5 may specifically bind to Env. For example, the VL5 may specifically bind to gp160. For example, the VL5 may specifically bind to gp120. For example, the VL5 may specifically bind to gp41. For example, the VL5 may specifically bind to p17. For example, the VL5 may specifically bind to p24. For example, the VL5 may specifically bind to p7. For example, the VL5 may specifically bind to p55. For example, the VL5 may specifically bind to p66. For example, the VL5 may specifically bind to p31. For example, the VL5 may specifically bind to Nef. For example, the VL5 may specifically bind to Tat. For example, the VL5 may specifically bind to Rev. For example, the VL5 may specifically bind to Vif. For example, the VL5 may specifically bind to Vpr. or example, the VL5 may specifically bind to Vpu. For example, the antigen binding polypeptide or polypeptide comprised within the antigen binding complex may comprise a VL6 that specifically binds to Env, gp160, gp120, gp41, p17, p24, p7, p55, p66, p31, Nef, Tat, Rev, Vif, Vpr and Vpu. For example, the VL6 may specifically bind to Env. For example, the VL6 may specifically bind to gp160. For example, the VL6 may specifically bind to gp120. For example, the VL6 may specifically bind to gp41. For example, the VL6 may specifically bind to p17. For example, the VL6 may specifically bind to p24. For example, the VL6 may specifically bind to p7. For example, the VL6 may specifically bind to p55. For example, the VL6 may specifically bind to p66. For example, the VL6 may specifically bind to p31. For example, the VL6 may specifically bind to Nef. For example, the VL6 may specifically bind to Tat. For example, the VL6 may specifically bind to Rev. For example, the VL6 may specifically bind to Vif. For example, the VL6 may specifically bind to Vpr. or example, the VL6 may specifically bind to Vpu. For example, the antigen binding polypeptide or polypeptide comprised within the antigen binding complex may comprise a VH1 that specifically binds to Env, gp160, gp120, gp41, p17, p24, p7, p55, p66, p31, Nef, Tat, Rev, Vif, Vpr and Vpu. For example, the VH1 may specifically bind to Env. For example, the VH1 may specifically bind to gp160. For example, the VH1 may specifically bind to gp120. For example, the VH1 may specifically bind to gp41. For example, the VH1 may specifically bind to p17. For example, the VH1 may specifically bind to p24. For example, the VH1 may specifically bind to p7. For example, the VH1 may specifically bind to p55. For example, the VH1 may specifically bind to p66. For example, the VH1 may specifically bind to p31. For example, the VH1 may specifically bind to Nef. For example, the VH1 may specifically bind to Tat. For example, the VH1 may specifically bind to Rev. For example, the VH1 may specifically bind to Vif. For example, the VH1 may specifically bind to Vpr. or example, the VH1 may specifically bind to Vpu. For example, the antigen binding polypeptide or polypeptide comprised within the antigen binding complex may comprise a VH2 that specifically binds to Env, gp160, gp120, gp41, p17, p24, p7, p55, p66, p31, Nef, Tat, Rev, Vif, Vpr and Vpu. For example, the VH2 may specifically bind to Env. For example, the VH2 may specifically bind to gp160. For example, the VH2 may specifically bind to gp120. For example, the VH2 may specifically bind to gp41. For example, the VH2 may specifically bind to p17. For example, the VH2 may specifically bind to p24. For example, the VH2 may specifically bind to p7. For example, the VH2 may specifically bind to p55. For example, the VH2 may specifically bind to p66. For example, the VH2 may specifically bind to p31. For example, the VH2 may specifically bind to Nef. For example, the VH2 may specifically bind to Tat. For example, the VH2 may specifically bind to Rev. For example, the VH2 may specifically bind to Vif. For example, the VH2 may specifically bind to Vpr. or example, the VH2 may specifically bind to Vpu. For example, the antigen binding polypeptide or polypeptide comprised within the antigen binding complex may comprise a VH3 that specifically binds to Env, gp160, gp120, gp41, p17, p24, p7, p55, p66, p31, Neft Tat, Rev, Vif, Vpr and Vpu. For example, the VH3 may specifically bind to Env. For example, the VH3 may specifically bind to gp160. For example, the VH3 may specifically bind to gp120. For example, the VH3 may specifically bind to gp41. For example, the VH3 may specifically bind to p17. For example, the VH3 may specifically bind to p24. For example, the VH3 may specifically bind to p7. For example, the VH3 may specifically bind to p55. For example, the VH3 may specifically bind to p66. For example, the VH3 may specifically bind to p31. For example, the VH3 may specifically bind to Nef For example, the VH3 may specifically bind to Tat. For example, the VH3 may specifically bind to Rev. For example, the VH3 may specifically bind to Vif For example, the VH3 may specifically bind to Vpr. or example, the VH3 may specifically bind to Vpu. For example, the antigen binding polypeptide or polypeptide comprised within the antigen binding complex may comprise a VH4 that specifically binds to Env, gp160, gp120, gp41, p17, p24, p7, p55, p66, p31, Nef, Tat, Rev, Vif, Vpr and Vpu. For example, the VH4 may specifically bind to Env. For example, the VH4 may specifically bind to gp160. For example, the VH4 may specifically bind to gp120. For example, the VH4 may specifically bind to gp41. For example, the VH4 may specifically bind to p17. For example, the VH4 may specifically bind to p24. For example, the VH4 may specifically bind to p7. For example, the VH4 may specifically bind to p55. For example, the VH4 may specifically bind to p66. For example, the VH4 may specifically bind to p31. For example, the VH4 may specifically bind to Nef. For example, the VH4 may specifically bind to Tat. For example, the VH4 may specifically bind to Rev. For example, the VH4 may specifically bind to Vif. For example, the VH4 may specifically bind to Vpr. or example, the VH4 may specifically bind to Vpu. For example, the antigen binding polypeptide or polypeptide comprised within the antigen binding complex may comprise a VH5 that specifically binds to Env, gp160, gp120, gp41, p17, p24, p7, p55, p66, p31, Nef, Tat, Rev, Vif, Vpr and Vpu. For example, the VH5 may specifically bind to Env. For example, the VH5 may specifically bind to gp160. For example, the VH5 may specifically bind to gp120. For example, the VH5 may specifically bind to gp41. For example, the VH5 may specifically bind to p17. For example, the VH5 may specifically bind to p24. For example, the VH5 may specifically bind to p7. For example, the VH5 may specifically bind to p55. For example, the VH5 may specifically bind to p66. For example, the VH5 may specifically bind to p31. For example, the VH5 may specifically bind to Nef. For example, the VH5 may specifically bind to Tat. For example, the VH5 may specifically bind to Rev. For example, the VH5 may specifically bind to Vif. For example, the VH5 may specifically bind to Vpr. or example, the VH5 may specifically bind to Vpu. For example, the antigen binding polypeptide or polypeptide comprised within the antigen binding complex may comprise a VH6 that specifically binds to Env, gp160, gp120, gp41, p17, p24, p7, p55, p66, p31, Nef, Tat, Rev, Vif, Vpr and Vpu. For example, the VH6 may specifically bind to Env. For example, the VH6 may specifically bind to gp160. For example, the VH6 may specifically bind to gp120. For example, the VH6 may specifically bind to gp41. For example, the VH6 may specifically bind to p17. For example, the VH6 may specifically bind to p24. For example, the VH6 may specifically bind to p7. For example, the VH6 may specifically bind to p55. For example, the VH6 may specifically bind to p66. For example, the VH6 may specifically bind to p31. For example, the VH6 may specifically bind to Nef. For example, the VH6 may specifically bind to Tat. For example, the VH6 may specifically bind to Rev. For example, the VH6 may specifically bind to Vif. For example, the VH6 may specifically bind to Vpr. or example, the VH6 may specifically bind to Vpu. Any of the antigen binding polypeptide structures and any of the antigen binding polypeptide complex structures described herein may be used to target one or more of the HIV proteins described herein.

[0202] In some aspects, provided herein is an antigen binding polypeptide complex comprising a first polypeptide and a second polypeptide; wherein the first polypeptide has a structure represented by VL1-VL2-VH2-VH1; VH1-VH2-VL2-VL1; VL1-L1-VL2-L2-VH2-L3-VH1; or VH1-L1-VH2-L2-VL2-L3-VL1; wherein the second polypeptide has a structure represented by VL3-VH3; VH3-VL3; VL3-L4-VH3; or VH3-L4-VL3; wherein VL1 is a first immunoglobulin light chain variable region that specifically binds to at least one epitope on at least one antigen selected from the group consisting of A2AR, APRIL, ATPDase, BAFF, BAFFR, BCMA, BlyS, BTK, BTLA, B7DC, B7H1, B7H2, B7H3, B7H4, B7H5, B7H6, B7H7, B7RP1, B7-4, C3, C5, CCL2, CCL3, CCL4, CCL5, CCL7, CCL8, CCL11, CCL15, CCL17, CCL19, CCL20, CCL21, CCL25 CCR3, CCR4, CD3, CD19, CD20, CD24, CD27, CD28, CD38, CD39, CD40, CD40L, CD47, CD52, CD70, CD80, CD86, CD123, CD133, CD137, CD137L, CD160, CD272, CEACAM5, CLEC9, CLEC91, CRTH2, CSF-1, CSF-2, CSF-3, CXCL1, CXCL2, CXCL4, CXCL12, CXCL13, CXCR3, cMet, CTLA4, DLL3, DNGR-1, E-cadherin, EGFR, ENTPD1, EpCAM, FCER1, FCER1A, FCER2, FGFR, FLAP, FOLH1, Gi24, GITR, GITRL, GPR5, HER2, HER3, ICOSL, ICOS, HHLA2, HMGB1, HVEM, IDO, IFNa, IgE, IGF1R, IL2Rbeta, IL1, IL1A, IL1B, IL1F10, IL2, IL4, IL4Ra, IL5, IL5R, IL6, IL7, IL7Ra, IL8, IL9, IL9R, IL10, rhIL10, IL12, IL13, IL13Ra1, IL13Ra2, IL15, IL17, IL17Rb, IL18, IL22, IL23, IL25, IL7, IL33, IL35, ITGB4, ITK, KIR, LAG3, LAMP1, leptin, LPFS2, MHC class II, MUC-1, MUC-16, NCR3LG1, NKG2D, NKp46, NTPDase-1, OX40, OX40L, PD-1, PD-L1, PD-L2, PROM1, S152, SIRPalpha, SISP1, SLC, SPG64, ST2, STEAP1, STEAP2, Syk kinase, STEAP1, TROP2, TACI, TDO, T14, TIGIT, TIM3, TLR, TLR2, TLR4, TLRS, TLR9, TMEF1, TNFa, TNFRSF7, Tp55, TREM1, TSLP, TSLPR, TWEAK, VEGF, VISTA, Vstm3, WUCAM, DLL4, TGFbeta, GP100, GPRC5D, CD30 and CD16A; VL2 is a second immunoglobulin light chain variable region that specifically binds to at least one epitope on at least one antigen selected from the group consisting of A2AR, APRIL, ATPDase, BAFF, BAFFR, BCMA, BlyS, BTK, BTLA, B7DC, B7H1, B7H2, B7H3, B7H4, B7H5, B7H6, B7H7, B7RP1, B7-4, C3, C5, CCL2, CCL3, CCL4, CCL5, CCL7, CCL8, CCL11, CCL15, CCL17, CCL19, CCL20, CCL21, CCL25 CCR3, CCR4, CD3, CD19, CD20, CD24, CD27, CD28, CD38, CD39, CD40, CD40L, CD47, CD52, CD70, CD80, CD86, CD123, CD133, CD137, CD137L, CD160, CD272, CEACAM5, CLEC9, CLEC91, CRTH2, CSF-1, CSF-2, CSF-3, CXCL1, CXCL2, CXCL4, CXCL12, CXCL13, CXCR3, cMet, CTLA4, DLL3, DNGR-1, E-cadherin, EGFR, ENTPD1, EpCAM, FCER1, FCER1A, FCER2, FGFR, FLAP, FOLH1, Gi24, GITR, GITRL, GPR5, HER2, HER3, ICOSL, ICOS, HHLA2, HMGB1, HVEM, IDO, IFNa, IgE, IGF1R, IL2Rbeta, IL1, IL1A, IL1B, IL1F10, IL2, IL4, IL4Ra, IL5, IL5R, IL6, IL7, IL7Ra, IL8, IL9, IL9R, IL10, rhIL10, IL12, IL13, IL13Ra1, IL13Ra2, IL15, IL17, IL17Rb, IL18, IL22, IL23, IL25, IL7, IL33, IL35, ITGB4, ITK, KIR, LAG3, LAMP1, leptin, LPFS2, MHC class II, MUC-1, MUC-16, NCR3LG1, NKG2D, NKp46, NTPDase-1, OX40, OX40L, PD-1, PD-L1, PD-L2, PROM1, S152, SIRPalpha, SISP1, SLC, SPG64, ST2, STEAP1, STEAP2, Syk kinase, STEAP1, TROP2, TACI, TDO, T14, TIGIT, TIM3, TLR, TLR2, TLR4, TLRS, TLR9, TMEF1, TNFa, TNFRSF7, Tp55, TREM1, TSLP, TSLPR, TWEAK, VEGF, VISTA, Vstm3, WUCAM, DLL4, TGFbeta, GP100, GPRC5D, CD30 and CD16A; VL3 is a second immunoglobulin light chain variable region that specifically binds to at least one epitope on at least one antigen selected from the group consisting of A2AR, APRIL, ATPDase, BAFF, BAFFR, BCMA, BlyS, BTK, BTLA, B7DC, B7H1, B7H2, B7H3, B7H4, B7H5, B7H6, B7H7, B7RP1, B7-4, C3, C5, CCL2, CCL3, CCL4, CCL5, CCL7, CCL8, CCL11, CCL15, CCL17, CCL19, CCL20, CCL21, CCL25 CCR3, CCR4, CD3, CD19, CD20, CD24, CD27, CD28, CD38, CD39, CD40, CD40L, CD47, CD52, CD70, CD80, CD86, CD123, CD133, CD137, CD137L, CD160, CD272, CEACAM5, CLEC9, CLEC91, CRTH2, CSF-1, CSF-2, CSF-3, CXCL1, CXCL2, CXCL4, CXCL12, CXCL13, CXCR3, cMet, CTLA4, DLL3, DNGR-1, E-cadherin, EGFR, ENTPD1, EpCAM, FCER1, FCER1A, FCER2, FGFR, FLAP, FOLH1, Gi24, GITR, GITRL, GPR5, HER2, HER3, ICOSL, ICOS, HHLA2, HMGB1, HVEM, IDO, IFNa, IgE, IGF1R, IL2Rbeta, IL1, IL1A, IL1B, ILF10, IL2, IL4, IL4Ra, IL5, IL5R, IL6, IL7, IL7Ra, IL8, IL9, IL9R, IL10, rhIL10, 1L12, IL13, IL13Ra1, IL13Ra2, IL15, IL17, IL17Rb, IL18, IL22, IL23, IL25, IL7, IL33, IL35, ITGB4, ITK, KIR, LAG3, LAMP1, leptin, LPFS2, MHC class II, MUC-1, MUC-16, NCR3LG1, NKG2D, NKp46, NTPDase-1, OX40, OX40L, PD-1, PD-L1, PD-L2, PROM1, S152, SIRPalpha, SISP1, SLC, SPG64, ST2, STEAP1, STEAP2, Syk kinase, STEAP1, TROP2, TACI, TDO, T14, TIGIT, TIM3, TLR, TLR2, TLR4, TLRS, TLR9, TMEF1, TNFa, TNFRSF7, Tp55, TREM1, TSLP, TSLPR, TWEAK, VEGF, VISTA, Vstm3, WUCAM, DLL4, TGFbeta, GP100, GPRC5D, CD30 and CD16A; VH1 is a first immunoglobulin heavy chain variable region that specifically binds to at least one epitope on at least one antigen selected from the group consisting of A2AR, APRIL, ATPDase, BAFF, BAFFR, BCMA, BlyS, BTK, BTLA, B7DC, B7H1, B7H2, B7H3, B7H4, B7H5, B7H6, B7H7, B7RP1, B7-4, C3, C5, CCL2, CCL3, CCL4, CCL5, CCL7, CCL8, CCL11, CCL15, CCL17, CCL19, CCL20, CCL21, CCL25 CCR3, CCR4, CD3, CD19, CD20, CD24, CD27, CD28, CD38, CD39, CD40, CD40L, CD47, CD52, CD70, CD80, CD86, CD123, CD133, CD137, CD137L, CD160, CD272, CEACAM5, CLEC9, CLEC91, CRTH2, CSF-1, CSF-2, CSF-3, CXCL1, CXCL2, CXCL4, CXCL12, CXCL13, CXCR3, cMet, CTLA4, DLL3, DNGR-1, E-cadherin, EGFR, ENTPD1, EpCAM, FCER1, FCER1A, FCER2, FGFR, FLAP, FOLH1, Gi24, GITR, GITRL, GPR5, HER2, HER3, ICOSL, ICOS, HHLA2, HMGB1, HVEM, IDO, IFNa, IgE, IGF1R, IL2Rbeta, IL1, IL1A, IL1B, ILF10, IL2, IL4, IL4Ra, IL5, IL5R, IL6, IL7, IL7Ra, IL8, IL9, IL9R, IL10, rhIL10, IL12, IL13, IL13Ra1, IL13Ra2, IL15, IL17, IL17Rb, IL18, IL22, IL23, IL25, IL7, IL33, IL35, ITGB4, ITK, KIR, LAG3, LAMP1, leptin, LPFS2, MHC class II, MUC-1, MUC-16, NCR3LG1, NKG2D, NKp46, NTPDase-1, OX40, OX40L, PD-1, PD-L1, PD-L2, PROM1, S152, SIRPalpha, SISP1, SLC, SPG64, ST2, STEAP1, STEAP2, Syk kinase, STEAP1, TROP2, TACI, TDO, T14, TIGIT, TIM3, TLR, TLR2, TLR4, TLRS, TLR9, TMEF1, TNFa, TNFRSF7, Tp55, TREM1, TSLP, TSLPR, TWEAK, VEGF, VISTA, Vstm3, WUCAM, DLL4, TGFbeta, GP100, GPRC5D, CD30 and CD16A; VH2 is a second immunoglobulin heavy chain variable region that specifically binds to at least one epitope on at least one antigen selected from the group consisting of A2AR, APRIL, ATPDase, BAFF, BAFFR, BCMA, BlyS, BTK, BTLA, B7DC, B71, B7H2, B7H3, B7H4, B7H5, B7H6, B7H7, B7RP1, B7-4, C3, C5, CCL2, CCL3, CCL4, CCL5, CCL7, CCL8, CCL11, CCL15, CCL17, CCL19, CCL20, CCL21, CCL25 CCR3, CCR4, CD3, CD19, CD20, CD24, CD27, CD28, CD38, CD39, CD40, CD40L, CD47, CD52, CD70, CD80, CD86, CD123, CD133, CD137, CD137L, CD160, CD272, CEACAM5, CLEC9, CLEC91, CRTH2, CSF-1, CSF-2, CSF-3, CXCL1, CXCL2, CXCL4, CXCL12, CXCL13, CXCR3, cMet, CTLA4, DLL3, DNGR-1, E-cadherin, EGFR, ENTPD1, EpCAM, FCER1, FCER1A, FCER2, FGFR, FLAP, FOLH1, Gi24, GITR, GITRL, GPR5, HER2, HER3, ICOSL, ICOS, HHLA2, HMGB1, HVEM, IDO, IFNa, IgE, IGF1R, IL2Rbeta, IL1, IL1A, ILB, IL1F10, IL2, IL4, IL4Ra, IL5, IL5R, IL6, IL7, IL7Ra, IL8, IL9, IL9R, IL10, rhIL10, IL12, IL13, IL13Ra1, I13Ra2, IL15, I17, I17Rb, IL18, IL22, IL23, IL25, IL7, IL33, IL35, ITGB4, ITK, KIR, LAG3, LAMP1, leptin, LPFS2, MHC class II, MUC-1, MUC-16, NCR3LG1, NKG2D, NKp46, NTPDase-1, OX40, OX40L, PD-1, PD-L1, PD-L2, PROM1, S1S2, SIRPalpha, SISP1, SLC, SPG64, ST2, STEAP1, STEAP2, Syk kinase, STEAP1, TROP2, TACI, TDO, T14, TIGIT, TIM3, TLR, TLR2, TLR4, TLR5, TLR9, TMEF1, TNFa, TNFRSF7, Tp55, TREM1, TSLP, TSLPR, TWEAK, VEGF, VISTA, Vstm3, WUCAM, DLL4, TGFbeta, GP100, GPRC5D, CD30 and CD16A; VH3 is a second immunoglobulin heavy chain variable region that specifically binds to at least one epitope on at least one antigen selected from the group consisting of A2AR, APRIL, ATPDase, BAFF, BAFFR, BCMA, BlyS, BTK, BTLA, B7DC, B7H1, B7H2, B7H3, B7H4, B7H5, B7H6, B7H7, B7RP1, B7-4, C3, C5, CCL2, CCL3, CCL4, CCL5, CCL7, CCL8, CCL11, CCL15, CCL17, CCL19, CCL20, CCL21, CCL25 CCR3, CCR4, CD3, CD19, CD20, CD24, CD27, CD28, CD38, CD39, CD40, CD40L, CD47, CD52, CD70, CD80, CD86, CD123, CD133, CD137, CD137L, CD160, CD272, CEACAM5, CLEC9, CLEC91, CRTH2, CSF-1, CSF-2, CSF-3, CXCL1, CXCL2, CXCL4, CXCL12, CXCL13, CXCR3, cMet, CTLA4, DLL3, DNGR-1, E-cadherin, EGFR, ENTPD1, EpCAM, FCER1, FCER1A, FCER2, FGFR, FLAP, FOLH1, Gi24, GITR, GITRL, GPR5, HER2, HER3, ICOSL, ICOS, HHLA2, HMGB1, HVEM, IDO, IFNa, IgE, IGF1R, IL2Rbeta, IL1, IL1A, IL1B, IL1F10, IL2, IL4, IL4Ra, IL5, IL5R, IL6, IL7, IL7Ra, IL8, IL9, IL9R, IL10, rhIL10, IL12, IL13, IL13Ra1, IL13Ra2, IL15, IL17, IL17Rb, IL18, IL22, IL23, IL25, IL7, IL33, IL35, ITGB4, ITK, KIR, LAG3, LAMP1, leptin, LPFS2, MHC class II, MUC-1, MUC-16, NCR3LG1, NKG2D, NKp46, NTPDase-1, OX40, OX40L, PD-1, PD-L1, PD-L2, PROM1, S1S2, SIRPalpha, SISP1, SLC, SPG64, ST2, STEAP1, STEAP2, Syk kinase, STEAP1, TROP2, TACI, TDO, T14, TIGIT, TIM3, TLR, TLR2, TLR4, TLR5, TLR9, TMEF1, TNFa, TNFRSF7, Tp55, TREM1, TSLP, TSLPR, TWEAK, VEGF, VISTA, Vstm3, WUCAM, DLL4, TGFbeta, GP100, GPRC5D, CD30 and CD16A; L1, L2, L3 and L4 are amino acid linkers; and wherein said antigen binding polypeptide further comprises at least one of the following (i)-(xxi): (i) an Fc region having an optional immunoglobulin hinge, wherein the immunoglobulin hinge comprises an upper hinge region, a middle hinge region, a lower hinge region, or a combination thereof; (ii) a linker selected from the group consisting of L1, L2 or L3 having a length of from about 1 amino acid to about 50 amino acids; (iii) a linker selected from the group consisting of L1, L2 or L3 selected from the group consisting of SEQ ID NO: 1, SEQ ID NO: 2, SEQ ID NO: 3, SEQ ID NO: 4, SEQ ID NO: 5, SEQ ID NO: 6, SEQ ID NO: 7, SEQ ID NO: 8, SEQ ID NO: 9, SEQ ID NO: 10, SEQ ID NO: 11, SEQ ID NO: 12, SEQ ID NO: 13, SEQ ID NO: 14, SEQ ID NO: 15, SEQ ID NO: 16, SEQ ID NO: 17, SEQ ID NO: 18, SEQ ID NO: 19, SEQ ID NO: 665, SEQ ID NO: 666, SEQ ID NO: 667, SEQ ID NO: 668, SEQ ID NO: 669, SEQ ID NO: 670, SEQ ID NO: 671, and SEQ ID NO: 672, or a sequence having at least 50%, at least 60%, at least 70%, at least 80%, at least 90%, or at least 95% identity to any one of SEQ ID NOs:1-19 and 665-672; (iv) a linker selected from L1, L2 or L3 which is non-immunogenic; (v) a linker selected from L1, L2 or L3 wherein said linker does not contain a consensus T cell epitope; (vi) an Fc region comprising at least one knob-into-hole modification; (vii) a detectable label; (viii) a detectable label selected from the group consisting of a radioactive label, chemiluminescent label, fluorescent label, enzyme, or peptide tag, or a combination thereof; (ix) a peptide tag; (x) a peptide tag selected from a polyhisitidine tag consisting of from about 4 to about 10 histidine residues; (xi) a peptide tag having about 8 histidine residues; (xii) the polypeptide is conjugated to an agent to form an antibody-agent conjugate; (xiii) an antibody-agent conjugate wherein the agent is selected from the group consisting of a cytotoxic agent, an immunomodulating agent, an imaging agent, a therapeutic protein, or a combination thereof; (xiv) an antigen binding polypeptide having an equilibrium dissociation constant (KD) of from about 10 μM to about 1 μM when bound to an epitope on a target antigen or when complexed with another antigen binding polypeptide to form an antigen binding polypeptide complex having at least two antigen binding polypeptides; (xv) an antibody or antigen binding fragment thereof; (xvi) an antibody or antigen binding fragment thereof selected from the group consisting of IgG, IgM, IgE, IgA or IgD; (xvii) an antibody or antigen binding fragment thereof selected from an IgG antibody selected from the group consisting of IgG1, IgG2, IgG3 or IgG4; (xviii) an antibody or antigen binding fragment selected from the group consisting of Fab, scFab, Fab′, F(ab′)₂, Fv or scFv; (xix) an antigen binding polypeptide having an effector function mutation; (xx) an antigen bind polypeptide which, when formed into an antigen binding polypeptide complex, is an IgG1 or IgG4 antibody and the knob-into-hole modification comprises (i) knob substitutions of S354C and T366W and hole substitutions of Y349C, T366S, L368A and Y407V; (ii) hole substitutions of L234A, L235A and P239A; (iii) hole substitutions of L234A and L235A; (iv) hole substitutions of M428L and N433S; (v) hole substitutions of M252Y, S254T and T256E; or (vi) a combination thereof, based on the EU numbering scheme; and (xxi) an antigen binding polypeptide as part of a chimeric receptor antigen. In some aspects, the first polypeptide has a structure represented by VL1-VL2-VH2-VH1 and the second polypeptide has a structure represented by VL3-VH3. In some aspects, the first polypeptide has a structure represented by VL1-VL2-VH2-VH1 and the second polypeptide has a structure represented by VH3-VL3. In some aspects, the first polypeptide has a structure represented by VL1-VL2-VH2-VH1 and the second polypeptide has a structure represented by VL3-L4-VH3. In some aspects, the first polypeptide has a structure represented by VL1-VL2-VH2-VH1 and the second polypeptide has a structure represented by VH3-L4-VL3. In some aspects, the first polypeptide has a structure represented by VH1-VH2-VL2-VL1 and the second polypeptide has a structure represented by VL3-VH3. In some aspects, the first polypeptide has a structure represented by VH1-VH2-VL2-VL1 and the second polypeptide has a structure represented by VH3-VL3. In some aspects, the first polypeptide has a structure represented by VH1-VH2-VL2-VL1 and the second polypeptide has a structure represented by VL3-L4-VH3. In some aspects, the first polypeptide has a structure represented by VH1-VH2-VL2-VL1 and the second polypeptide has a structure represented by VH3-L4-VL3. In some aspects, the first polypeptide has a structure represented by VL1-L1-VL2-L2-VH2-L3-VH1 and the second polypeptide has a structure represented by VL3-VH3. In some aspects, the first polypeptide has a structure represented by VL1-L1-VL2-L2-VH2-L3-VH1 and the second polypeptide has a structure represented by VH3-VL3. In some aspects, the first polypeptide has a structure represented by VL1-L1-VL2-L2-VH2-L3-VH1 and the second polypeptide has a structure represented by VL3-L4-VH3. In some aspects, the first polypeptide has a structure represented by VL1-L1-VL2-L2-VH2-L3-VH1 and the second polypeptide has a structure represented by VH3-L4-VL3. In some aspects, the first polypeptide has a structure represented by VH1-L1-VH2-L2-VL2-L3-VL1 and the second polypeptide has a structure represented by VL3-VH3. In some aspects, the first polypeptide has a structure represented by VH1-L1-VH2-L2-VL2-L3-VL1 and the second polypeptide has a structure represented by VH3-VL3. In some aspects, the first polypeptide has a structure represented by VH1-L1-VH2-L2-VL2-L3-VL1 and the second polypeptide has a structure represented by VL3-L4-VH3. In some aspects, the first polypeptide has a structure represented by VH1-L1-VH2-L2-VL2-L3-VL1 and the second polypeptide has a structure represented by VH3-L4-VL3.

[0203] In some aspects, provided herein is an antigen binding polypeptide complex comprising a first polypeptide, a second polypeptide, and a third polypeptide; wherein the first polypeptide has a structure represented by VL1-VL2-VH2-VH1; VH1-VH2-VL2-VL1; VL1-L1-VL2-L2-VH2-L3-VH1; or VH1-L1-VH2-L2-VL2-L3-VL1; wherein the second polypeptide has a structure represented by VL3; wherein the third polypeptide has a structure represented by VH3; wherein VL1 is a first immunoglobulin light chain variable region that specifically binds to at least one epitope on at least one antigen selected from the group consisting of A2AR, APRIL, ATPDase, BAFF, BAFFR, BCMA, BlyS, BTK, BTLA, B7DC, B7H1, B7H2, B7H3, B7H4, B7H5, B7H6, B7H7, B7RP1, B7-4, C3, C5, CCL2, CCL3, CCL4, CCL5, CCL7, CCL8, CCL1l, CCL15, CCL17, CCL19, CCL20, CCL21, CCL25 CCR3, CCR4, CD3, CD19, CD20, CD24, CD27, CD28, CD38, CD39, CD40, CD40L, CD47, CD52, CD70, CD80, CD86, CD123, CD133, CD137, CD137L, CD160, CD272, CEACAM5, CLEC9, CLEC91, CRTH2, CSF-1, CSF-2, CSF-3, CXCL1, CXCL2, CXCL4, CXCL12, CXCL13, CXCR3, cMet, CTLA4, DLL3, DNGR-1, E-cadherin, EGFR, ENTPD1, EpCAM, FCER1, FCER1A, FCER2, FGFR, FLAP, FOLH1, Gi24, GITR, GITRL, GPR5, HER2, HER3, ICOSL, ICOS, HHLA2, HMGB1, HVEM, IDO, IFNa, IgE, IGF1R, IL2Rbeta, IL1, IL1A, IL1B, IL1F10, IL2, IL4, IL4Ra, IL5, IL5R, IL6, IL7, IL7Ra, IL8, IL9, IL9R, IL10, rhIL10, IL12, IL13, IL13Ra1, IL13Ra2, IL15, IL17, IL17Rb, IL18, IL22, IL23, IL25, IL7, IL33, IL35, ITGB4, ITK, KIR, LAG3, LAMP1, leptin, LPFS2, MHC class II, MUC-1, MUC-16, NCR3LG1, NKG2D, NKp46, NTPDase-1, OX40, OX40L, PD-1, PD-L1, PD-L2, PROM1, S152, SIRPalpha, SISP1, SLC, SPG64, ST2, STEAP1, STEAP2, Syk kinase, STEAP1, TROP2, TACI, TDO, T14, TIGIT, TIM3, TLR, TLR2, TLR4, TLR5, TLR9, TMEF1, TNFa, TNFRSF7, Tp55, TREM1, TSLP, TSLPR, TWEAK, VEGF, VISTA, Vstm3, WUCAM, DLL4, TGFbeta, GP100, GPRC5D, CD30 and CD16A; VL2 is a second immunoglobulin light chain variable region that specifically binds to at least one epitope on at least one antigen selected from the group consisting of A2AR, APRIL, ATPDase, BAFF, BAFFR, BCMA, BlyS, BTK, BTLA, B7DC, B7H1, B7H2, B7H3, B7H4, B7H5, B7H6, B7H7, B7RP1, B7-4, C3, C5, CCL2, CCL3, CCL4, CCL5, CCL7, CCL8, CCLI1, CCL15, CCL17, CCL19, CCL20, CCL21, CCL25 CCR3, CCR4, CD3, CD19, CD20, CD24, CD27, CD28, CD38, CD39, CD40, CD40L, CD47, CD52, CD70, CD80, CD86, CD123, CD133, CD137, CD137L, CD160, CD272, CEACAM5, CLEC9, CLEC91, CRTH2, CSF-1, CSF-2, CSF-3, CXCL1, CXCL2, CXCL4, CXCL12, CXCL13, CXCR3, cMet, CTLA4, DLL3, DNGR-1, E-cadherin, EGFR, ENTPD1, EpCAM, FCER1, FCER1A, FCER2, FGFR, FLAP, FOLH1, Gi24, GITR, GITRL, GPR5, HER2, HER3, ICOSL, ICOS, HHLA2, HMGB1, HVEM, IDO, IFNa, IgE, IGF1R, IL2Rbeta, IL1, IL1A, IL1B, IL1F10, IL2, IL4, IL4Ra, IL5, IL5R, IL6, IL7, IL7Ra, IL8, IL9, IL9R, IL10, rhIL10, IL12, IL13, IL13Ra1, IL13Ra2, IL15, IL17, IL17Rb, IL18, IL22, IL23, IL25, IL7, IL33, IL35, ITGB4, ITK, KIR, LAG3, LAMP1, leptin, LPFS2, MHC class II, MUC-1, MUC-16, NCR3LG1, NKG2D, NKp46, NTPDase-1, OX40, OX40L, PD-1, PD-L1, PD-L2, PROM1, S152, SIRPalpha, SISP1, SLC, SPG64, ST2, STEAP1, STEAP2, Syk kinase, STEAP1, TROP2, TACI, TDO, T14, TIGIT, TIM3, TLR, TLR2, TLR4, TLRS, TLR9, TMEF1, TNFa, TNFRSF7, Tp55, TREM1, TSLP, TSLPR, TWEAK, VEGF, VISTA, Vstm3, WUCAM, DLL4, TGFbeta, GP100, GPRC5D, CD30 and CD16A; VL3 is a second immunoglobulin light chain variable region that specifically binds to at least one epitope on at least one antigen selected from the group consisting of A2AR, APRIL, ATPDase, BAFF, BAFFR, BCMA, BlyS, BTK, BTLA, B7DC, B7H1, B7H2, B7H3, B7H4, B7H5, B7H6, B7H7, B7RP1, B7-4, C3, C5, CCL2, CCL3, CCL4, CCL5, CCL7, CCL8, CCL11, CCL15, CCL17, CCL19, CCL20, CCL21, CCL25 CCR3, CCR4, CD3, CD19, CD20, CD24, CD27, CD28, CD38, CD39, CD40, CD40L, CD47, CD52, CD70, CD80, CD86, CD123, CD133, CD137, CD137L, CD160, CD272, CEACAM5, CLEC9, CLEC91, CRTH2, CSF-1, CSF-2, CSF-3, CXCL1, CXCL2, CXCL4, CXCL12, CXCL13, CXCR3, cMet, CTLA4, DLL3, DNGR-1, E-cadherin, EGFR, ENTPD1, EpCAM, FCER1, FCER1A, FCER2, FGFR, FLAP, FOLH1, Gi24, GITR, GITRL, GPR5, HER2, HER3, ICOSL, ICOS, HHLA2, HMGB1, HVEM, IDO, IFNa, IgE, IGF1R, IL2Rbeta, IL1, IL1A, IL1B, IL1F10, IL2, IL4, IL4Ra, IL5, IL5R, IL6, IL7, IL7Ra, IL8, IL9, IL9R, IL10, rhIL10, IL12, IL13, IL13Ra1, IL13Ra2, 1115, IL17, 117Rb, IL18, IL22, IL23, IL25, IL7, IL33, IL35, ITGB4, ITK, KIR, LAG3, LAMP1, leptin, LPFS2, MHC class II, MUC-1, MUC-16, NCR3LG1, NKG2D, NKp46, NTPDase-1, OX40, OX40L, PD-1, PD-L1, PD-L2, PROM1, S152, SIRPalpha, SISP1, SLC, SPG64, ST2, STEAP1, STEAP2, Syk kinase, STEAP1, TROP2, TACI, TDO, T14, TIGIT, TIM3, TLR, TLR2, TLR4, TLR5, TLR9, TMEF1, TNFa, TNFRSF7, Tp55, TREM1, TSLP, TSLPR, TWEAK, VEGF, VISTA, Vstm3, WUCAM, DLL4, TGFbeta, GP100, GPRC5D, CD30 and CD16A; VIII is a first immunoglobulin heavy chain variable region that specifically binds to at least one epitope on at least one antigen selected from the group consisting of A2AR, APRIL, ATPDase, BAFF, BAFFR, BCMA, BlyS, BTK, BTLA, B7DC, B7H1, B7H2, B7H3, B7H4, B7H5, B7H6, B7H7, B7RP1, B7-4, C3, C5, CCL2, CCL3, CCL4, CCL5, CCL7, CCL8, CCL11, CCL15, CCL17, CCL19, CCL20, CCL21, CCL25 CCR3, CCR4, CD3, CD19, CD20, CD24, CD27, CD28, CD38, CD39, CD40, CD40L, CD47, CD52, CD70, CD80, CD86, CD123, CD133, CD137, CD137L, CD160, CD272, CEACAM5, CLEC9, CLEC91, CRTH2, CSF-1, CSF-2, CSF-3, CXCL1, CXCL2, CXCL4, CXCL12, CXCL13, CXCR3, cMet, CTLA4, DLL3, DNGR-1, E-cadherin, EGFR, ENTPD1, EpCAM, FCER1, FCER1A, FCER2, FGFR, FLAP, FOLH1, Gi24, GITR, GITRL, GPR5, HER2, HER3, ICOSL, ICOS, HHLA2, HMGB1, HVEM, IDO, IFNa, IgE, IGF1R, IL2Rbeta, IL1, IL1A, IL1B, ILF10, 112, IL4, IL4Ra, IL5, IL5R, IL6, 117, IL7Ra, IL8, IL9, IL9R, IL10, rhIL10, 11i2, IL13, IL13Ra1, IL13Ra2, IL15, IL17, IL17Rb, IL18, 1122, IL23, IL25, IL7, 1133, IL35, ITGB4, ITK, KIR, LAG3, LAMP1, leptin, LPFS2, MHC class II, MUC-1, MUC-16, NCR3LG1, NKG2D, NKp46, NTPDase-1, OX40, OX40L, PD-1, PD-L1, PD-L2, PROM1, S152, SIRPalpha, SISP1, SLC, SPG64, ST2, STEAP1, STEAP2, Syk kinase, STEAP1, TROP2, TACI, TDO, T14, TIGIT, TIM3, TLR, TLR2, TLR4, TLR5, TLR9, TMEF1, TNFa, TNFRSF7, Tp55, TREM1, TSLP, TSLPR, TWEAK, VEGF, VISTA, Vstm3, WUCAM, DLL4, TGFbeta, GP100, GPRC5D, CD30 and CD16A; VH2 is a second immunoglobulin heavy chain variable region that specifically binds to at least one epitope on at least one antigen selected from the group consisting of A2AR, APRIL, ATPDase, BAFF, BAFFR, BCMA, BlyS, BTK, BTLA, B7DC, B7H1, B7H2, B7H3, B7H4, B7H5, B7H6, B7H7, B7RP1, B7-4, C3, C5, CCL2, CCL3, CCL4, CCL5, CCL7, CCL8, CCL11, CCL15, CCL17, CCL19, CCL20, CCL21, CCL25 CCR3, CCR4, CD3, CD19, CD20, CD24, CD27, CD28, CD38, CD39, CD40, CD40L, CD47, CD52, CD70, CD80, CD86, CD123, CD133, CD137, CD137L, CD160, CD272, CEACAM5, CLEC9, CLEC91, CRTH2, CSF-1, CSF-2, CSF-3, CXCL1, CXCL2, CXCL4, CXCL12, CXCL13, CXCR3, cMet, CTLA4, DLL3, DNGR-1, E-cadherin, EGFR, ENTPD1, EpCAM, FCER1, FCER1A, FCER2, FGFR, FLAP, FOLH1, Gi24, GITR, GITRL, GPR5, HER2, HER3, ICOSL, ICOS, HHLA2, HMGB1, HVEM, IDO, IFNa, IgE, IGF1R, IL2Rbeta, IL1, IL1A, ILB, IL1F10, IL2, IL4, IL4Ra, IL5, IL5R, IL6, 117, IL7Ra, IL8, IL9, IL9R, IL10, rhIL10, IL12, IL13, IL13Ra1, I13Ra2, IL15, IL17, 117Rb, IL18, 1122, IL23, IL25, IL7, IL33, IL35, ITGB4, ITK, KIR, LAG3, LAMP1, leptin, LPFS2, MHC class II, MUC-1, MUC-16, NCR3LG1, NKG2D, NKp46, NTPDase-1, OX40, OX40L, PD-1, PD-L1, PD-L2, PROM1, S1S2, SIRPalpha, SISP1, SLC, SPG64, ST2, STEAP1, STEAP2, Syk kinase, STEAP1, TROP2, TACI, TDO, T14, TIGIT, TIM3, TLR, TLR2, TLR4, TLR5, TLR9, TMEF1, TNFa, TNFRSF7, Tp55, TREM1, TSLP, TSLPR, TWEAK, VEGF, VISTA, Vstm3, WUCAM, DLL4, TGFbeta, GP100, GPRC5D, CD30 and CD16A; VH3 is a second immunoglobulin heavy chain variable region that specifically binds to at least one epitope on at least one antigen selected from the group consisting of A2AR, APRIL, ATPDase, BAFF, BAFFR, BCMA, BlyS, BTK, BTLA, B7DC, B7H1, B7H2, B7H3, B7H4, B7H5, B7H6, B7H7, B7RP1, B7-4, C3, C5, CCL2, CCL3, CCL4, CCL5, CCL7, CCL8, CCL11, CCL15, CCL17, CCL19, CCL20, CCL21, CCL25 CCR3, CCR4, CD3, CD19, CD20, CD24, CD27, CD28, CD38, CD39, CD40, CD40L, CD47, CD52, CD70, CD80, CD86, CD123, CD133, CD137, CD137L, CD160, CD272, CEACAM5, CLEC9, CLEC91, CRTH2, CSF-1, CSF-2, CSF-3, CXCL1, CXCL2, CXCL4, CXCL12, CXCL13, CXCR3, cMet, CTLA4, DLL3, DNGR-1, E-cadherin, EGFR, ENTPD1, EpCAM, FCER1, FCER1A, FCER2, FGFR, FLAP, FOLH1, Gi24, GITR, GITRL, GPR5, HER2, HER3, ICOSL, ICOS, HHLA2, HMGB1, HVEM, IDO, IFNa, IgE, IGF1R, IL2Rbeta, IL1, IL1A, IL1B, IL1F10, IL2, IL4, IL4Ra, IL5, IL5R, IL6, IL7, IL7Ra, IL8, IL9, IL9R, IL10, rhIL10, IL12, IL13, IL13Ra1, IL13Ra2, IL15, IL17, IL17Rb, I118, IL22, IL23, IL25, IL7, IL33, IL35, ITGB4, ITK, KIR, LAG3, LAMP1, leptin, LPFS2, MHC class II, MUC-1, MUC-16, NCR3LG1, NKG2D, NKp46, NTPDase-1, OX40, OX40L, PD-1, PD-L1, PD-L2, PROM1, S1S2, SIRPalpha, SISP1, SLC, SPG64, ST2, STEAP1, STEAP2, Syk kinase, STEAP1, TROP2, TACI, TDO, T14, TIGIT, TIM3, TLR, TLR2, TLR4, TLR5, TLR9, TMEF1, TNFa, TNFRSF7, Tp55, TREM1, TSLP, TSLPR, TWEAK, VEGF, VISTA, Vstm3, WUCAM, DLL4, TGFbeta, GP100, GPRC5D, CD30 and CD16A; L1, L2 and L3 are amino acid linkers; and wherein said antigen binding polypeptide further comprises at least one of the following (i)-(xxi): (i) an Fc region having an optional immunoglobulin hinge, wherein the immunoglobulin hinge comprises an upper hinge region, a middle hinge region, a lower hinge region, or a combination thereof; (ii) a linker selected from the group consisting of L1, L2 or L3 having a length of from about 1 amino acid to about 50 amino acids; (iii) a linker selected from the group consisting of L1, L2 or L3 selected from the group consisting of SEQ ID NO: 1, SEQ ID NO: 2, SEQ ID NO: 3, SEQ ID NO: 4, SEQ ID NO: 5, SEQ ID NO: 6, SEQ ID NO: 7, SEQ ID NO: 8, SEQ ID NO: 9, SEQ ID NO: 10, SEQ ID NO: 11, SEQ ID NO: 12, SEQ ID NO: 13, SEQ ID NO: 14, SEQ ID NO: 15, SEQ ID NO: 16, SEQ ID NO: 17, SEQ ID NO: 18, SEQ ID NO: 19, SEQ ID NO: 665, SEQ ID NO: 666, SEQ ID NO: 667, SEQ ID NO: 668, SEQ ID NO: 669, SEQ ID NO: 670, SEQ ID NO: 671, or SEQ ID NO: 672, or a sequence having at least 50%, at least 60%, at least 70%, at least 80%, at least 90%, or at least 95% identity to any one of SEQ ID NOs:1-19 and 665-672; (iv) a linker selected from L1, L2 or L3 which is non-immunogenic; (v) a linker selected from L1, L2 or L3 wherein said linker does not contain a consensus T cell epitope; (vi) an Fc region comprising at least one knob-into-hole modification; (vii) a detectable label; (viii) a detectable label selected from the group consisting of a radioactive label, chemiluminescent label, fluorescent label, enzyme, or peptide tag, or a combination thereof; (ix) a peptide tag; (x) a peptide tag selected from a polyhisitidine tag consisting of from about 4 to about 10 histidine residues; (xi) a peptide tag having about 8 histidine residues; (xii) the polypeptide is conjugated to an agent to form an antibody-agent conjugate; (xiii) an antibody-agent conjugate wherein the agent is selected from the group consisting of a cytotoxic agent, an immunomodulating agent, an imaging agent, a therapeutic protein, or a combination thereof; (xiv) an antigen binding polypeptide having an equilibrium dissociation constant (KD) of from about 10 μM to about 1 μM when bound to an epitope on a target antigen or when complexed with another antigen binding polypeptide to form an antigen binding polypeptide complex having at least two antigen binding polypeptides; (xv) an antibody or antigen binding fragment thereof; (xvi) an antibody or antigen binding fragment thereof selected from the group consisting of IgG, IgM, IgE, IgA or IgD; (xvii) an antibody or antigen binding fragment thereof selected from an IgG antibody selected from the group consisting of IgG1, IgG2, IgG3 or IgG4; (xviii) an antibody or antigen binding fragment selected from the group consisting of Fab, scFab, Fab′, F(ab′)₂, Fv or scFv; (xix) an antigen binding polypeptide having an effector function mutation; (xx) an antigen bind polypeptide which, when formed into an antigen binding polypeptide complex, is an IgG1 or IgG4 antibody and the knob-into-hole modification comprises (i) knob substitutions of S354C and T366W and hole substitutions of Y349C, T366S, L368A and Y407V; (ii) hole substitutions of L234A, L235A and P239A; (iii) hole substitutions of L234A and L235A; (iv) hole substitutions of M428L and N433S; (v) hole substitutions of M252Y, S254T and T256E; or (vi) a combination thereof, based on the EU numbering scheme; and (xxi) an antigen binding polypeptide as part of a chimeric receptor antigen.

[0204] In another aspect, the invention is directed to an antigen binding polypeptide complex (e.g., an antibody or antigen binding fragment thereof) comprising a first polypeptide having a structure represented by VL1-VL2-VH2-VH1 or VH1-VH2-VL2-VL1 and a second polypeptide having a structure of VL3-VH3 or VH3-VL3, wherein the antigen binding polypeptide complex specifically binds to an HIV protein. In another aspect, the invention is directed to an antigen binding polypeptide complex comprising a first polypeptide having a structure represented by VL1-VL2-VH2-VH1 or VH1-VH2-VL2-VL1; a second polypeptide having a structure represented by VL3; and a third polypeptide having a structure represented by VH3, wherein the antigen binding polypeptide complex specifically binds to an HIV protein. In some aspects, the antigen binding polypeptide complex contains an amino acid linker between any two regions denoted in a structure described herein. In some aspects, the antigen binding polypeptide complex contains an Fc region, CH1 region, CL region, or any combination thereof. In another aspect, the antigen binding polypeptide complex is an antibody or antigen binding fragment thereof.

[0205] Specific binding to an HIV protein includes, but is not limited to, specific binding to one or more HIV proteins and specific binding to one or more epitopes on the same HIV protein. In some aspects, the HIV protein is selected from the group consisting of an HIV envelope protein, an HIV structural protein, an HIV functional protein, or an HIV accessory protein. In some aspects, the HIV envelope protein is HIV envelope glycoprotein (Env), HIV envelope glycoprotein gp160, HIV envelope surface glycoprotein gp120, or HIV transmembrane envelope protein gp41. In some aspects, the HIV structural protein is p17, p24, p7 or p55. In some aspects, the HIV functional protein is p66, HIV-1 protease (PR) or p31. In some aspects, the HIV accessory protein is Nef, Tat, Rev, Vif, Vpr or Vpu.

[0206] In another aspect of an antigen binding polypeptide complex provided herein, VH1 is a first immunoglobulin heavy chain variable region that specifically binds to at least one epitope on at least one antigen selected from the group consisting of Env, gp160, gp120, gp41, p17, p24, p7, p55, p66, p31, Nef, Tat, Rev, Vif, Vpr and Vpu.

[0207] In another aspect of an antigen binding polypeptide complex provided herein, VH2 is a second immunoglobulin heavy chain variable region that specifically binds to at least one epitope on at least one antigen selected from the group consisting of Env, gp160, gp120, gp41, p17, p24, p7, p55, p66, p31, Nef, Tat, Rev, Vif, Vpr and Vpu.

[0208] In another aspect of an antigen binding polypeptide complex provided herein, VH3 is a third immunoglobulin heavy chain variable region that specifically binds to at least one epitope on at least one antigen selected from the group consisting of Env, gp160, gp120, gp41, p17, p24, p7, p55, p66, p31, Nef, Tat, Rev, Vif, Vpr and Vpu.

[0209] In another aspect of an antigen binding polypeptide complex provided herein, VL1 is a first immunoglobulin light chain variable region that specifically binds to at least one epitope on at least one antigen selected from the group consisting of Env, gp160, gp120, gp41, p17, p24, p7, p55, p66, p31, Nef, Tat, Rev, Vif, Vpr and Vpu.

[0210] In another aspect of an antigen binding polypeptide complex provided herein, VL2 is a second immunoglobulin light chain variable region that specifically binds to at least one epitope on at least one antigen selected from the group consisting of Env, gp160, gp120, gp41, p17, p24, p7, p55, p66, p31, Nef, Tat, Rev, Vif, Vpr and Vpu.

[0211] In another aspect of an antigen binding polypeptide complex provided herein, VL3 is a third immunoglobulin light chain variable region that specifically binds to at least one epitope on at least one antigen selected from the group consisting of Env, gp160, gp120, gp41, p17, p24, p7, p55, p66, p31, Nef, Tat, Rev, Vif, Vpr and Vpu.

[0212] In another aspect of an antigen binding polypeptide complex provided herein, VH1 is a first immunoglobulin heavy chain variable region that specifically binds to at least one epitope on at least one antigen selected from the group consisting of Env, gp160, gp120, gp41, p17, p24, p7, p55, p66, p31, Nef, Tat, Rev, Vif, Vpr and Vpu; VH2 is a second immunoglobulin heavy chain variable region that specifically binds to at least one epitope on at least one antigen selected from the group consisting of Env, gp160, gp120, gp41, p17, p24, p7, p55, p66, p31, Nef, Tat, Rev, Vif, Vpr and Vpu; VH3 is a third immunoglobulin heavy chain variable region that specifically binds to at least one epitope on at least one antigen selected from the group consisting of Env, gp160, gp120, gp41, p17, p24, p7, p55, p66, p31, Nef, Tat, Rev, Vif, Vpr and Vpu; VL1 is a first immunoglobulin light chain variable region that specifically binds to at least one epitope on at least one antigen selected from the group consisting of Env, gp160, gp120, gp41, p17, p24, p7, p55, p66, p31, Nef, Tat, Rev, Vif, Vpr and Vpu; VL2 is a second immunoglobulin light chain variable region that specifically binds to at least one epitope on at least one antigen selected from the group consisting of Env, gp160, gp120, gp41, p17, p24, p7, p55, p66, p31, Nef, Tat, Rev, Vif, Vpr and Vpu; and VL3 is a third immunoglobulin light chain variable region that specifically binds to at least one epitope on at least one antigen selected from the group consisting of Env, gp160, gp120, gp41, p17, p24, p7, p55, p66, p31, Nef, Tat, Rev, Vif, Vpr and Vpu.

[0213] In some aspects, an antigen binding polypeptide complex provided herein comprises a first polypeptide and a second polypeptide; wherein the first polypeptide has a structure represented by VL1-VL2-VH2-VH1; VH1-VH2-VL2-VL1; VL1-L1-VL2-L2-VH2-L3-VH1; or VH1-L1-VH2-L2-VL2-L3-VL1; wherein the second polypeptide has a structure represented by VL3-VH3; VH3-VL3; VL3-L4-VH3; or VH3-L4-VL3; wherein VL1 is a first immunoglobulin light chain variable region that specifically binds to at least one epitope on at least one antigen selected from the group consisting of Env, gp160, gp120, gp41, p17, p24, p7, p55, p66, HIV-1 protease, p31, Nef, Tat, Rev, Vif, Vpr and Vpu; VL2 is a second immunoglobulin light chain variable region that specifically binds to at least one epitope on at least one antigen selected from the group consisting of Env, gp160, gp120, gp41, p17, p24, p7, p55, p66, HIV-1 protease, p31, Nef, Tat, Rev, Vif, Vpr and Vpu; VL3 is a third immunoglobulin light chain variable region that specifically binds to at least one epitope on at least one antigen selected from the group consisting of Env, gp160, gp120, gp41, p17, p24, p7, p55, p66, HIV-1 protease, p31, Net, Tat, Rev, Vif, Vpr and Vpu; VH1 is a first immunoglobulin heavy chain variable region that specifically binds to at least one epitope on at least one antigen selected from the group consisting of Env, gp160, gp120, gp41, p17, p24, p7, p55, p66, HIV-1 protease, p31, Net, Tat, Rev, Vif, Vpr and Vpu; VH2 is a second immunoglobulin heavy chain variable region that specifically binds to at least one epitope on at least one antigen selected from the group consisting of Env, gp160, gp120, gp41, p17, p24, p7, p55, p66, HIV-1 protease, p31, Nef, Tat, Rev, Vif, Vpr and Vpu; VH3 is a third immunoglobulin heavy chain variable region that specifically binds to at least one epitope on at least one antigen selected from the group consisting of Env, gp160, gp120, gp41, p17, p24, p7, p55, p66, HIV-1 protease, p31, Nef, Tat, Rev, Vif, Vpr and Vpu; L1, L2, L3 and L4 are amino acid linkers; wherein said antigen binding polypeptide complex further comprises at least one of the following (i)-(xxi): (i) an Fc region having an optional immunoglobulin hinge, wherein the immunoglobulin hinge comprises an upper hinge region, a middle hinge region, a lower hinge region, or a combination thereof; (ii) a linker selected from the group consisting of L1, L2, L3 and L4 having a length of from about 1 amino acid to about 50 amino acids; (iii) a linker selected from the group consisting of L1, L2, L3 and L4 selected from the group consisting of SEQ ID NO: 1, SEQ ID NO: 2, SEQ ID NO: 3, SEQ ID NO: 4, SEQ ID NO: 5, SEQ ID NO: 6, SEQ ID NO: 7, SEQ ID NO: 8, SEQ ID NO: 9, SEQ ID NO: 10, SEQ ID NO: 11, SEQ ID NO: 12, SEQ ID NO: 13, SEQ ID NO: 14, SEQ ID NO: 15, SEQ ID NO: 16, SEQ ID NO: 17, SEQ ID NO: 18, SEQ ID NO: 19, SEQ ID NO: 665, SEQ ID NO: 666, SEQ ID NO: 667, SEQ ID NO: 668, SEQ ID NO: 669, SEQ ID NO: 670, SEQ ID NO: 671, and SEQ ID NO: 672, or a sequence having at least 50%, at least 60%, at least 70%, at least 80%, at least 90%, or at least 95% identity to any one of SEQ ID NOs:1-19 and 665-672; (iv) a linker selected from the group consisting of L1, L2, L3 and L4 which is non-immunogenic; (v) a linker selected from the group consistig of L1, L2, L3 and L4, wherein said linker does not contain a consensus T cell epitope; (vi) an Fc region comprising at least one knob-into-hole modification; (vii) a detectable label; (viii) a detectable label selected from the group consisting of a radioactive label, chemiluminescent label, fluorescent label, enzyme, or peptide tag, or a combination thereof; (ix) a peptide tag; (x) a peptide tag selected from a polyhisitidine tag consisting of from about 4 to about 10 histidine residues; (xi) a peptide tag having about 8 histidine residues; (xii) the polypeptide is conjugated to an agent to form an antibody-agent conjugate; (xiii) an antibody-agent conjugate wherein the agent is selected from the group consisting of a cytotoxic agent, an immunomodulating agent, an imaging agent, a therapeutic protein, or a combination thereof; (xiv) an antigen binding polypeptide having an equilibrium dissociation constant (KD) of from about 10 μM to about 1 μM when bound to an epitope on a target antigen or when complexed with another antigen binding polypeptide to form an antigen binding polypeptide complex having at least two antigen binding polypeptides; (xv) an antibody or antigen binding fragment thereof; (xvi) an antibody or antigen binding fragment thereof selected from the group consisting of IgG, IgM, IgE, IgA or IgD; (xvii) an antibody or antigen binding fragment thereof selected from an IgG antibody selected from the group consisting of IgG1, IgG2, IgG3 or IgG4; (xviii) an antibody or antigen binding fragment selected from the group consisting of Fab, scFab, Fab′, F(ab′)₂, Fv or scFv; (xix) an antigen binding polypeptide having an effector function mutation; (xx) an antigen bind polypeptide which, when formed into an antigen binding polypeptide complex, is an IgG1 or IgG4 antibody and the knob-into-hole modification comprises (i) knob substitutions of S354C and T366W and hole substitutions of Y349C, T366S, L368A and Y407V; (ii) hole substitutions of L234A, L235A and P239A; (iii) hole substitutions of L234A and L235A; (iv) hole substitutions of M428L and N433S; (v) hole substitutions of M252Y, S254T and T256E; or (vi) a combination thereof, based on the EU numbering scheme; and (xxi) an antigen binding polypeptide as part of a chimeric receptor antigen. In some aspects, the first polypeptide has a structure represented by VL1-VL2-VH2-VH1 and the second polypeptide has a structure represented by VL3-VH3. In some aspects, the first polypeptide has a structure represented by VL1-VL2-VH2-VH1 and the second polypeptide has a structure represented by VH3-VL3. In some aspects, the first polypeptide has a structure represented by VL1-VL2-VH2-VH1 and the second polypeptide has a structure represented by VL3-L4-VH3. In some aspects, the first polypeptide has a structure represented by VL1-VL2-VH2-VH1 and the second polypeptide has a structure represented by VH3-L4-VL3. In some aspects, the first polypeptide has a structure represented by VH1-VH2-VL2-VL1 and the second polypeptide has a structure represented by VL3-VH3. In some aspects, the first polypeptide has a structure represented by VH1-VH2-VL2-VL1 and the second polypeptide has a structure represented by VH3-VL3. In some aspects, the first polypeptide has a structure represented by VH1-VH2-VL2-VL1 and the second polypeptide has a structure represented by VL3-L4-VH3. In some aspects, the first polypeptide has a structure represented by VH1-VH2-VL2-VL1 and the second polypeptide has a structure represented by VH3-L4-VL3. In some aspects, the first polypeptide has a structure represented by VL1-L1-VL2-L2-VH2-L3-VH1 and the second polypeptide has a structure represented by VL3-VH3. In some aspects, the first polypeptide has a structure represented by VL1-L1-VL2-L2-VH2-L3-VH1 and the second polypeptide has a structure represented by VH3-VL3. In some aspects, the first polypeptide has a structure represented by VL1-L1-VL2-L2-VH2-L3-VH1 and the second polypeptide has a structure represented by VL3-L4-VH3. In some aspects, the first polypeptide has a structure represented by VL1-L1-VL2-L2-VH2-L3-VH1 and the second polypeptide has a structure represented by VH3-L4-VL3. In some aspects, the first polypeptide has a structure represented by VH1-L1-VH2-L2-VL2-L3-VL1 and the second polypeptide has a structure represented by VL3-VH3. In some aspects, the first polypeptide has a structure represented by VH1-L1-VH2-L2-VL2-L3-VL1 and the second polypeptide has a structure represented by VH3-VL3. In some aspects, the first polypeptide has a structure represented by VH1-L1-VH2-L2-VL2-L3-VL1 and the second polypeptide has a structure represented by VL3-L4-VH3. In some aspects, the first polypeptide has a structure represented by VH1-L1-VH2-L2-VL2-L3-VL1 and the second polypeptide has a structure represented by VH3-L4-VL3.

[0214] In some aspects, an antigen binding polypeptide complex provided herein comprises a first polypeptide, a second polypeptide, and a third polypeptide; wherein the first polypeptide has a structure represented by VL1-VL2-VH2-VH1; VH1-VH2-VL2-VL1; VL1-L1-VL2-L2-VH2-L3-VH1; or VH1-L1-VH2-L2-VL2-L3-VL1; wherein the second polypeptide has a structure represented by VL3; wherein the third polypeptide has a structure represented by VH3; wherein VL1 is a first immunoglobulin light chain variable region that specifically binds to at least one epitope on at least one antigen selected from the group consisting of Env, gp160, gp120, gp41, p17, p24, p7, p55, p66, HIV-1 protease, p31, Nef, Tat, Rev, Vif, Vpr and Vpu; VL2 is a second immunoglobulin light chain variable region that specifically binds to at least one epitope on at least one antigen selected from the group consisting of Env, gp160, gp120, gp41, p17, p24, p7, p55, p66, HIV-1 protease, p31, Nef, Tat, Rev, Vif, Vpr and Vpu; VL3 is a third immunoglobulin light chain variable region that specifically binds to at least one epitope on at least one antigen selected from the group consisting of Env, gp160, gp120, gp41, p17, p24, p7, p55, p66, HIV-1 protease, p31, Nef, Tat, Rev, Vif, Vpr and Vpu; VH1 is a first immunoglobulin heavy chain variable region that specifically binds to at least one epitope on at least one antigen selected from the group consisting of Env, gp160, gp120, gp41, p17, p24, p7, p55, p66, HIV-1 protease, p31, Nef, Tat, Rev, Vif, Vpr and Vpu; VH2 is a second immunoglobulin heavy chain variable region that specifically binds to at least one epitope on at least one antigen selected from the group consisting of Env, gp160, gp120, gp41, p17, p24, p7, p55, p66, HIV-1 protease, p31, Nef, Tat, Rev, Vif, Vpr and Vpu; VH3 is a third immunoglobulin heavy chain variable region that specifically binds to at least one epitope on at least one antigen selected from the group consisting of Env, gp160, gp120, gp41, p17, p24, p7, p55, p66, HIV-1 protease, p31, Nef, Tat, Rev, Vif, Vpr and Vpu; L1, L2 and L3 are amino acid linkers; wherein said antigen binding polypeptide complex further comprises at least one of the following (i)-(xxi): (i) an Fc region having an optional immunoglobulin hinge, wherein the immunoglobulin hinge comprises an upper hinge region, a middle hinge region, a lower hinge region, or a combination thereof; (ii) a linker selected from the group consisting of L1, L2 and L3 having a length of from about 1 amino acid to about 50 amino acids; (iii) a linker selected from the group consisting of L1, L2 and L3 selected from the group consisting of SEQ ID NO: 1, SEQ ID NO: 2, SEQ ID NO: 3, SEQ ID NO: 4, SEQ ID NO: 5, SEQ ID NO: 6, SEQ ID NO: 7, SEQ ID NO: 8, SEQ ID NO: 9, SEQ ID NO: 10, SEQ ID NO: 11, SEQ ID NO: 12, SEQ ID NO: 13, SEQ ID NO: 14, SEQ ID NO: 15, SEQ ID NO: 16, SEQ ID NO: 17, SEQ ID NO: 18, SEQ ID NO: 19, SEQ ID NO: 665, SEQ ID NO: 666, SEQ ID NO: 667, SEQ ID NO: 668, SEQ ID NO: 669, SEQ ID NO: 670, SEQ ID NO: 671, and SEQ ID NO: 672, or a sequence having at least 50%, at least 60%, at least 70%, at least 80%, at least 90%, or at least 95% identity to any one of SEQ ID NOs: 1-19 and 665-672; (iv) a linker selected from the group consisting of L1, L2 and L3 which is non-immunogenic; (v) a linker selected from the group consisting of L1, L2 and L3, wherein said linker does not contain a consensus T cell epitope; (vi) an Fc region comprising at least one knob-into-hole modification; (vii) a detectable label; (viii) a detectable label selected from the group consisting of a radioactive label, chemiluminescent label, fluorescent label, enzyme, or peptide tag, or a combination thereof; (ix) a peptide tag; (x) a peptide tag selected from a polyhisitidine tag consisting of from about 4 to about 10 histidine residues; (xi) a peptide tag having about 8 histidine residues; (xii) the polypeptide is conjugated to an agent to form an antibody-agent conjugate; (xiii) an antibody-agent conjugate wherein the agent is selected from the group consisting of a cytotoxic agent, an immunomodulating agent, an imaging agent, a therapeutic protein, or a combination thereof; (xiv) an antigen binding polypeptide having an equilibrium dissociation constant (KD) of from about 10 μM to about 1 μM when bound to an epitope on a target antigen or when complexed with another antigen binding polypeptide to form an antigen binding polypeptide complex having at least two antigen binding polypeptides; (xv) an antibody or antigen binding fragment thereof; (xvi) an antibody or antigen binding fragment thereof selected from the group consisting of IgG, IgM, IgE, IgA or IgD; (xvii) an antibody or antigen binding fragment thereof selected from an IgG antibody selected from the group consisting of IgG1, IgG2, IgG3 or IgG4; (xviii) an antibody or antigen binding fragment selected from the group consisting of Fab, scFab, Fab′, F(ab′)₂, Fv or scFv; (xix) an antigen binding polypeptide having an effector function mutation; (xx) an antigen bind polypeptide which, when formed into an antigen binding polypeptide complex, is an IgG1 or IgG4 antibody and the knob-into-hole modification comprises (i) knob substitutions of S354C and T366W and hole substitutions of Y349C, T366S, L368A and Y407V; (ii) hole substitutions of L234A, L235A and P239A; (iii) hole substitutions of L234A and L235A; (iv) hole substitutions of M428L and N433S; (v) hole substitutions of M252Y, S254T and T256E; or (vi) a combination thereof, based on the EU numbering scheme; and (xxi) an antigen binding polypeptide as part of a chimeric receptor antigen.

[0215] In some aspects, the invention is directed to an antigen binding polypeptide complex comprising a first polypeptide and a second polypeptide; wherein the first polypeptide has a structure represented by VL1-VL2-VH2-VH1; VH1-VH2-VL2-VL1; VL1-L1-VL2-L2-VH2-L3-VH1; or VH1-L1-VH2-L2-VL2-L3-VL1; wherein the second polypeptide has a structure represented by VL3-VH3; VH3-VL3; VL3-L4-VH3; or VH3-L4-VL3; wherein VL1 is a first immunoglobulin light chain variable region that specifically binds to an HIV protein; VL2 is a second immunoglobulin light chain variable region that specifically binds to an HIV protein; VL3 is a third immunoglobulin light chain variable region that specifically binds to an HIV protein; VH1 is a first immunoglobulin heavy chain variable region that specifically binds to an HIV protein; VH2 is a second immunoglobulin heavy chain variable region that specifically binds to an HIV protein; VH3 is a third immunoglobulin heavy chain variable region that specifically binds to an HIV protein; and L1, L2, L3 and L4 are amino acid linkers. In some aspects, the first polypeptide has a structure represented by VL1-VL2-VH2-VH1 and the second polypeptide has a structure represented by VL3-VH3. In some aspects, the first polypeptide has a structure represented by VL1-VL2-VH2-VH1 and the second polypeptide has a structure represented by VH3-VL3. In some aspects, the first polypeptide has a structure represented by VL1-VL2-VH2-VH1 and the second polypeptide has a structure represented by VL3-L4-VH3. In some aspects, the first polypeptide has a structure represented by VL1-VL2-VH2-VH1 and the second polypeptide has a structure represented by VH3-L4-VL3. In some aspects, the first polypeptide has a structure represented by VH1-VH2-VL2-VL1 and the second polypeptide has a structure represented by VL3-VH3. In some aspects, the first polypeptide has a structure represented by VH1-VH2-VL2-VL1 and the second polypeptide has a structure represented by VH3-VL3. In some aspects, the first polypeptide has a structure represented by VH1-VH2-VL2-VL1 and the second polypeptide has a structure represented by VL3-L4-VH3. In some aspects, the first polypeptide has a structure represented by VH1-VH2-VL2-VL1 and the second polypeptide has a structure represented by VH3-L4-VL3. In some aspects, the first polypeptide has a structure represented by VL1-L1-VL2-L2-VH2-L3-VH1 and the second polypeptide has a structure represented by VL3-VH3. In some aspects, the first polypeptide has a structure represented by VL1-L1-VL2-L2-VH2-L3-VH1 and the second polypeptide has a structure represented by VH3-VL3. In some aspects, the first polypeptide has a structure represented by VL1-L1-VL2-L2-VH2-L3-VH1 and the second polypeptide has a structure represented by VL3-L4-VH3. In some aspects, the first polypeptide has a structure represented by VL1-L1-VL2-L2-VH2-L3-VH1 and the second polypeptide has a structure represented by VH3-L4-VL3. In some aspects, the first polypeptide has a structure represented by VH1-L1-VH2-L2-VL2-L3-VL1 and the second polypeptide has a structure represented by VL3-VH3. In some aspects, the first polypeptide has a structure represented by VH1-L1-VH2-L2-VL2-L3-VL1 and the second polypeptide has a structure represented by VH3-VL3. In some aspects, the first polypeptide has a structure represented by VH1-L1-VH2-L2-VL2-L3-VL1 and the second polypeptide has a structure represented by VL3-L4-VH3. In some aspects, the first polypeptide has a structure represented by VH1-L1-VH2-L2-VL2-L3-VL1 and the second polypeptide has a structure represented by VH3-L4-VL3.

[0216] In other aspects, the invention is directed to an antigen binding polypeptide complex comprising a first polypeptide and a second polypeptide; wherein the first polypeptide has a structure represented by VL1-VL2-VH2-VH1-Fc; VH1-VH2-VL2-VL1-Fc; VL1-L1-VL2-L2-VH2-L3-VH1-Fc; VH1-L1-VH2-L2-VL2-L3-VL1-Fc; VL1-L1-VL2-L2-VH2-L3-VH1-L4-Fc; or VH1-L1-VH2-L2-VL2-L3-VL1-L4-Fc; wherein the second polypeptide has a structure represented by VL3-VH3-Fc; VH3-VL3-Fc; VL3-L5-VH3-Fc; VH3-L5-VL3-Fc; VL3-L5-VH3-L6-Fc; or VH3-L5-VL3-L6-Fc; wherein VL1 is a first immunoglobulin light chain variable region that specifically binds to an HIV protein; VL2 is a second immunoglobulin light chain variable region that specifically binds to an HIV protein; VL3 is a third immunoglobulin light chain variable region that specifically binds to an HIV protein; VH1 is a first immunoglobulin heavy chain variable region that specifically binds to an HIV protein; VH2 is a second immunoglobulin heavy chain variable region that specifically binds to an HIV protein; VH3 is a third immunoglobulin heavy chain variable region that specifically binds to an HIV protein; Fc is a region comprising an immunoglobulin heavy chain constant region 2 (CH2), an immunoglobulin heavy chain constant region 3 (CH3), and optionally, an immunoglobulin hinge; and L1, L2, L3, L4, L5 and L6 are amino acid linkers. In some aspects, the first polypeptide has a structure represented by VL1-VL2-VH2-VH1-Fc; VH1-VH2-VL2-VL1-Fc; VL1-L1-VL2-L2-VH2-L3-VH1-Fc; VH1-L1-VH2-L2-VL2-L3-VL1-Fc; VL1-L1-VL2-L2-VH2-L3-VH1-L4-Fc; or VH1-L1-VH2-L2-VL2-L3-VL1-L4-Fc, and the second polypeptide has a structure represented by VL3-VH3-Fc. In some aspects, the first polypeptide has a structure represented by VL1-VL2-VH2-VH1-Fc; VH1-VH2-VL2-VL1-Fc; VL1-L1-VL2-L2-VH2-L3-VH1-Fc; VH1-L1-VH2-L2-VL2-L3-VL1-Fc; VL1-L1-VL2-L2-VH2-L3-VH1-L4-Fc; or VH1-L1-VH2-L2-VL2-L3-VL1-L4-Fc, and the second polypeptide has a structure represented by VH3-VL3-Fc. In some aspects, the first polypeptide has a structure represented by VL1-VL2-VH2-VH1-Fc; VH1-VH2-VL2-VL1-Fc; VL1-L1-VL2-L2-VH2-L3-VH1-Fc; VH1-L1-VH2-L2-VL2-L3-VL1-Fc; VL1-L1-VL2-L2-VH2-L3-VH1-L4-Fc; or VH1-L1-VH2-L2-VL2-L3-VL1-L4-Fc, and the second polypeptide has a structure represented by VL3-L5-VH3-Fc. In some aspects, the first polypeptide has a structure represented by VL1-VL2-VH2-VH1-Fc; VH1-VH2-VL2-VL1-Fc; VL1-L1-VL2-L2-VH2-L3-VH1-Fc; VH1-L1-VH2-L2-VL2-L3-VL1-Fc; VL1-L1-VL2-L2-VH2-L3-VH1-L4-Fc; or VH1-L1-VH2-L2-VL2-L3-VL1-L4-Fc, and the second polypeptide has a structure represented by VH3-L5-VL3-Fc. In some aspects, the first polypeptide has a structure represented by VL1-VL2-VH2-VH1-Fc; VH1-VH2-VL2-VL1-Fc; VL1-L1-VL2-L2-VH2-L3-VH1-Fc; VH1-L1-VH2-L2-VL2-L3-VL1-Fc; VL1-L1-VL2-L2-VH2-L3-VH1-L4-Fc; or VH1-L1-VH2-L2-VL2-L3-VL1-L4-Fc, and the second polypeptide has a structure represented by VL3-L5-VH3-L6-Fc. In some aspects, the first polypeptide has a structure represented by VL1-VL2-VH2-VH1-Fc; VH1-VH2-VL2-VL1-Fc; VL1-L1-VL2-L2-VH2-L3-VH1-Fc; VH1-L1-VH2-L2-VL2-L3-VL1-Fc; VL1-L1-VL2-L2-VH2-L3-VH1-L4-Fc; or VH1-L1-VH2-L2-VL2-L3-VL1-L4-Fc, and the second polypeptide has a structure represented by VH3-L5-VL3-L6-Fc.

[0217] In other aspects, the invention is directed to an antigen binding polypeptide complex comprising a first polypeptide and a second polypeptide; wherein the first polypeptide has a structure represented by VL1-VL2-VH2-VH1-CH1; VH1-VH2-VL2-VL1-CH1; VL1-VL2-VH2-VH1-CL; VH1-VH2-VL2-VL1-CL; VL1-VL2-VH2-VH1-CH1-CL; VH1-VH2-VL2-VL1-CH1-CL; VL1-VL2-VH2-VH1-CL-CH1; VH1-VH2-VL2-VL1-CL-CH1; VL1-L1-VL2-L2-VH2-L3-VH1-L4-CH1; VH1-L1-VH2-L2-VL2-L3-VL1-L4-CH1; VL1-L1-VL2-L2-VH2-L3-VH1-L4-CL; VH1-L1-VH2-L2-VL2-L3-VL1-L4-CL; VL1-L1-VL2-L2-VH2-L3-VH1-L4-CH1-L5-CL; VH1-L1-VH2-L2-VL2-L3-VL1-L4-CH1-L5-CL; VL1-L1-VL2-L2-VH2-L3-VH1-L4-CL-L5-CH1; or VH1-L1-VH2-L2-VL2-L3-VL1-L4-CL-L5-CH1; wherein the second polypeptide has a structure represented by VL3-VH3-CH1; VH3-VL3-CH1; VL3-VH3-CL; VH3-VL3-CL; VL3-VH3-CH1-CL; VH3-VL3-CH1-CL; VL3-VH3-CL-CH1; VH3-VL3-CL-CH1; VL3-CL-VH3-CH1; VL3-CH1-VH3-CL; VH3-CH1-VL3-CL; VH3-CL-VL3-CH1; VL3-L6-VH3-L7-CH1; VH3-L6-VL3-L7-CH1; VL3-L6-VH3-L7-CL; VH3-L6-VL3-L7-CL; VL3-L6-VH3-L7-CH1-L8-CL; VH3-L6-VL3-L7-CH1-L8-CL; VL3-L6-VH3-L7-CL-L8-CH1; VH3-L6-VL3-L7-CL-L8-CH1; VL3-L6-CL-L7-VH3-L8-CH1; VL3-L6-CH1-L7-VH3-L8-CL; VH3-L6-CH1-L7-VL3-L8-CL; VH3-L6-CL-L7-VL3-L8-CH1; VL3-VH3-L6-CH1-CL; VH3-VL3-L6-CH1-CL; VL3-VH3-L6-CL-CH1; VH3-VL3-L6-CL-CH1; VL3-CL-L6-VH3-CH1; VL3-CH1-L6-VH3-CL; VH3-CH1-L6-VL3-CL; or VH3-CL-L6-VL3-CH1; wherein VL1 is a first immunoglobulin light chain variable region that specifically binds to an HIV protein; VL2 is a second immunoglobulin light chain variable region that specifically binds to an HIV protein; VL3 is a third immunoglobulin light chain variable region that specifically binds to an HIV protein; VH1 is a first immunoglobulin heavy chain variable region that specifically binds to an HIV protein; VH2 is a second immunoglobulin heavy chain variable region that specifically binds to an HIV protein; VH3 is a third immunoglobulin heavy chain variable region that specifically binds to an HIV protein; CH1 is an immunoglobulin heavy chain constant region 1; CL is an immunoglobulin light chain constant region; and L1, L2, L3, L4, L5, L6, L7 and L8 are amino acid linkers. In some aspects, the first polypeptide has a structure represented by VL1-VL2-VH2-VH1i-CH1 and the second polypeptide has a structure represented by VL3-VH3-CH1; VH3-VL3-CH1; VL3-VH3-CL; VH3-VL3-CL; VL3-VH3-CH1-CL; VH3-VL3-CH1-CL; VL3-VH3-CL-CH1; VH3-VL3-CL-CH1; VL3-CL-VH3-CH1; VL3-CH1-VH3-CL; VH3-CH1-VL3-CL; VH3-CL-VL3-CH1; VL3-L6-VH3-L7-CH1; VH3-L6-VL3-L7-CH1; VL3-L6-VH3-L7-CL; VH3-L6-VL3-L7-CL; VL3-L6-VH3-L7-CH1-L8-CL; VH3-L6-VL3-L7-CH1-L8-CL; VL3-L6-VH3-L7-CL-L8-CH1; VH3-L6-VL3-L7-CL-L8-CH1; VL3-L6-CL-L7-VH3-L8-CH1; VL3-L6-CH1-L7-VH3-L8-CL; VH3-L6-CH1-L7-VL3-L8-CL; VH3-L6-CL-L7-VL3-L8-CH1; VL3-VH3-L6-CH1-CL; VH3-VL3-L6-CH1-CL; VL3-VH3-L6-CL-CH1; VH3-VL3-L6-CL-CH1; VL3-CL-L6-VH3-CH1; VL3-CH1-L6-VH3-CL; VH3-CH1-L6-VL3-CL; or VH3-CL-L6-VL3-CH1. In some aspects, the first polypeptide has a structure represented by VH1-VH2-VL2-VL1-CH1 and the second polypeptide has a structure represented by VL3-VH3-CH1; VH3-VL3-CH1; VL3-VH3-CL; VH3-VL3-CL; VL3-VH3-CH1-CL; VH3-VL3-CH1-CL; VL3-VH3-CL-CH1; VH3-VL3-CL-CH1; VL3-CL-VH3-CH1; VL3-CH1-VH3-CL; VH3-CH1-VL3-CL; VH3-CL-VL3-CH1; VL3-L6-VH3-L7-CH1; VH3-L6-VL3-L7-CH1; VL3-L6-VH3-L7-CL; VH3-L6-VL3-L7-CL; VL3-L6-VH3-L7-CH1-L8-CL; VH3-L6-VL3-L7-CH1-L8-CL; VL3-L6-VH3-L7-CL-L8-CH1; VH3-L6-VL3-L7-CL-L8-CH1; VL3-L6-CL-L7-VH3-L8-CH1; VL3-L6-CH1-L7-VH3-L8-CL; VH3-L6-CH1-L7-VL3-L8-CL; VH3-L6-CL-L7-VL3-L8-CH1; VL3-VH3-L6-CH1-CL; VH3-VL3-L6-CH1-CL; VL3-VH3-L6-CL-CH1; VH3-VL3-L6-CL-CH1; VL3-CL-L6-VH3-CH1; VL3-CH1-L6-VH3-CL; VH3-CH1-L6-VL3-CL; or VH3-CL-L6-VL3-CH1. In some aspects, the first polypeptide has a structure represented by VL1-VL2-VH2-VH1-CL and the second polypeptide has a structure represented by VL3-VH3-CH1; VH3-VL3-CH1; VL3-VH3-CL; VH3-VL3-CL; VL3-VH3-CH1-CL; VH3-VL3-CH1-CL; VL3-VH3-CL-CH1; VH3-VL3-CL-CH1; VL3-CL-VH3-CH1; VL3-CH1-VH3-CL; VH3-CH1-VL3-CL; VH3-CL-VL3-CH1; VL3-L6-VH3-L7-CH1; VH3-L6-VL3-L7-CH1; VL3-L6-VH3-L7-CL; VH3-L6-VL3-L7-CL; VL3-L6-VH3-L7-CH1-L8-CL; VH3-L6-VL3-L7-CH1-L8-CL; VL3-L6-VH3-L7-CL-L8-CH1; VH3-L6-VL3-L7-CL-L8-CH1; VL3-L6-CL-L7-VH3-L8-CH1; VL3-L6-CH1-L7-VH3-L8-CL; VH3-L6-CH1-L7-VL3-L8-CL; VH3-L6-CL-L7-VL3-L8-CH1; VL3-VH3-L6-CH1-CL; VH3-VL3-L6-CH1-CL; VL3-VH3-L6-CL-CH1; VH3-VL3-L6-CL-CH1; VL3-CL-L6-VH3-CH1; VL3-CH1-L6-VH3-CL; VH3-CH1-L6-VL3-CL; or VH3-CL-L6-VL3-CH1. In some aspects, the first polypeptide has a structure represented by VH1-VH2-VL2-VL1-CL and the second polypeptide has a structure represented by VL3-VH3-CH1; VH3-VL3-CH1; VL3-VH3-CL; VH3-VL3-CL; VL3-VH3-CH1-CL; VH3-VL3-CH1-CL; VL3-VH3-CL-CH1; VH3-VL3-CL-CH1; VL3-CL-VH3-CH1; VL3-CH1-VH3-CL; VH3-CH1-VL3-CL; VH3-CL-VL3-CH1; VL3-L6-VH3-L7-CH1; VH3-L6-VL3-L7-CH1; VL3-L6-VH3-L7-CL; VH3-L6-VL3-L7-CL; VL3-L6-VH3-L7-CH1-L8-CL; VH3-L6-VL3-L7-CH1-L8-CL; VL3-L6-VH3-L7-CL-L8-CH1; VH3-L6-VL3-L7-CL-L8-CH1; VL3-L6-CL-L7-VH3-L8-CH1; VL3-L6-CH1-L7-VH3-L8-CL; VH3-L6-CH1-L7-VL3-L8-CL; VH3-L6-CL-L7-VL3-L8-CH1; VL3-VH3-L6-CH1-CL; VH3-VL3-L6-CH1-CL; VL3-VH3-L6-CL-CH1; VH3-VL3-L6-CL-CH1; VL3-CL-L6-VH3-CH1; VL3-CH1-L6-VH3-CL; VH3-CH1-L6-VL3-CL; or VH3-CL-L6-VL3-CH1. In some aspects, the first polypeptide has a structure represented by VL1-VL2-VH2-VH1-CH1-CL and the second polypeptide has a structure represented by VL3-VH3-CH1; VH3-VL3-CH1; VL3-VH3-CL; VH3-VL3-CL; VL3-VH3-CH1-CL; VH3-VL3-CH1-CL; VL3-VH3-CL-CH1; VH3-VL3-CL-CH1; VL3-CL-VH3-CH1; VL3-CH1-VH3-CL; VH3-CH1-VL3-CL; VH3-CL-VL3-CH1; VL3-L6-VH3-L7-CH1; VH3-L6-VL3-L7-CH1; VL3-L6-VH3-L7-CL; VH3-L6-VL3-L7-CL; VL3-L6-VH3-L7-CH1-L8-CL; VH3-L6-VL3-L7-CH1-L8-CL; VL3-L6-VH3-L7-CL-L8-CH1; VH3-L6-VL3-L7-CL-L8-CH1; VL3-L6-CL-L7-VH3-L8-CH1; VL3-L6-CH1-L7-VH3-L8-CL; VH3-L6-CH1-L7-VL3-L8-CL; VH3-L6-CL-L7-VL3-L8-CH1; VL3-VH3-L6-CH1-CL; VH3-VL3-L6-CH1-CL; VL3-VH3-L6-CL-CH1; VH3-VL3-L6-CL-CH1; VL3-CL-L6-VH3-CH1; VL3-CH1-L6-VH3-CL; VH3-CH1-L6-VL3-CL; or VH3-CL-L6-VL3-CH1. In some aspects, the first polypeptide has a structure represented by VH1-VH2-VL2-VL1-CH1-CL and the second polypeptide has a structure represented by VL3-VH3-CH1; VH3-VL3-CH1; VL3-VH3-CL; VH3-VL3-CL; VL3-VH3-CH1-CL; VH3-VL3-CH1-CL; VL3-VH3-CL-CH1; VH3-VL3-CL-CH1; VL3-CL-VH3-CH1; VL3-CH1-VH3-CL; VH3-CH1-VL3-CL; VH3-CL-VL3-CH1; VL3-L6-VH3-L7-CH1; VH3-L6-VL3-L7-CH1; VL3-L6-VH3-L7-CL; VH3-L6-VL3-L7-CL; VL3-L6-VH3-L7-CH1-L8-CL; VH3-L6-VL3-L7-CH1-L8-CL; VL3-L6-VH3-L7-CL-L8-CH1; VH3-L6-VL3-L7-CL-L8-CH1; VL3-L6-CL-L7-VH3-L8-CH1; VL3-L6-CH1-L7-VH3-L8-CL; VH3-L6-CH1-L7-VL3-L8-CL; VH3-L6-CL-L7-VL3-L8-CH1; VL3-VH3-L6-CH1-CL; VH3-VL3-L6-CH1-CL; VL3-VH3-L6-CL-CH1; VH3-VL3-L6-CL-CH1; VL3-CL-L6-VH3-CH1; VL3-CH1-L6-VH3-CL; VH3-CH1-L6-VL3-CL; or VH3-CL-L6-VL3-CH1. In some aspects, the first polypeptide has a structure represented by VL1-VL2-VH2-VH1-CL-CH1 and the second polypeptide has a structure represented by VL3-VH3-CH1; VH3-VL3-CH1; VL3-VH3-CL; VH3-VL3-CL; VL3-VH3-CH1-CL; VH3-VL3-CH1-CL; VL3-VH3-CL-CH1; VH3-VL3-CL-CH1; VL3-CL-VH3-CH1; VL3-CH1-VH3-CL; VH3-CH1-VL3-CL; VH3-CL-VL3-CH1; VL3-L6-VH3-L7-CH1; VH3-L6-VL3-L7-CH1; VL3-L6-VH3-L7-CL; VH3-L6-VL3-L7-CL; VL3-L6-VH3-L7-CH1-L8-CL; VH3-L6-VL3-L7-CH1-L8-CL; VL3-L6-VH3-L7-CL-L8-CH1; VH3-L6-VL3-L7-CL-L8-CH1; VL3-L6-CL-L7-VH3-L8-CH1; VL3-L6-CH1-L7-VH3-L8-CL; VH3-L6-CH1-L7-VL3-L8-CL; VH3-L6-CL-L7-VL3-L8-CH1; VL3-VH3-L6-CH1-CL; VH3-VL3-L6-CH1-CL; VL3-VH3-L6-CL-CH1; VH3-VL3-L6-CL-CH1; VL3-CL-L6-VH3-CH1; VL3-CH1-L6-VH3-CL; VH3-CH1-L6-VL3-CL; or VH3-CL-L6-VL3-CH1. In some aspects, the first polypeptide has a structure represented by VH1-VH2-VL2-VL1-CL-CH1 and the second polypeptide has a structure represented by VL3-VH3-CH1; VH3-VL3-CH1; VL3-VH3-CL; VH3-VL3-CL; VL3-VH3-CH1-CL; VH3-VL3-CH1-CL; VL3-VH3-CL-CH1; VH3-VL3-CL-CH1; VL3-CL-VH3-CH1; VL3-CH1-VH3-CL; VH3-CH1-VL3-CL; VH3-CL-VL3-CH1; VL3-L6-VH3-L7-CH1; VH3-L6-VL3-L7-CH1; VL3-L6-VH3-L7-CL; VH3-L6-VL3-L7-CL; VL3-L6-VH3-L7-CH1-L8-CL; VH3-L6-VL3-L7-CH1-L8-CL; VL3-L6-VH3-L7-CL-L8-CH1; VH3-L6-VL3-L7-CL-L8-CH1; VL3-L6-CL-L7-VH3-L8-CH1; VL3-L6-CH1-L7-VH3-L8-CL; VH3-L6-CH1-L7-VL3-L8-CL; VH3-L6-CL-L7-VL3-L8-CH1; VL3-VH3-L6-CH1-CL; VH3-VL3-L6-CH1-CL; VL3-VH3-L6-CL-CH1; VH3-VL3-L6-CL-CH1; VL3-CL-L6-VH3-CH1; VL3-CH1-L6-VH3-CL; VH3-CH1-L6-VL3-CL; or VH3-CL-L6-VL3-CH1. In some aspects, the first polypeptide has a structure represented by VL1-L1-VL2-L2-VH2-L3-VH1-L4-CH1 and the second polypeptide has a structure represented by VL3-VH3-CH1; VH3-VL3-CH1; VL3-VH3-CL; VH3-VL3-CL; VL3-VH3-CH1-CL; VH3-VL3-CH1-CL; VL3-VH3-CL-CH1; VH3-VL3-CL-CH1; VL3-CL-VH3-CH1; VL3-CH1-VH3-CL; VH3-CH1-VL3-CL; VH3-CL-VL3-CH1; VL3-L6-VH3-L7-CH1; VH3-L6-VL3-L7-CH1; VL3-L6-VH3-L7-CL; VH3-L6-VL3-L7-CL; VL3-L6-VH3-L7-CH1-L8-CL; VH3-L6-VL3-L7-CH1-L8-CL; VL3-L6-VH3-L7-CL-L8-CH1; VH3-L6-VL3-L7-CL-L8-CH1; VL3-L6-CL-L7-VH3-L8-CH1; VL3-L6-CH1-L7-VH3-L8-CL; VH3-L6-CH1-L7-VL3-L8-CL; VH3-L6-CL-L7-VL3-L8-CH1; VL3-VH3-L6-CH1-CL; VH3-VL3-L6-CH1-CL; VL3-VH3-L6-CL-CH1; VH3-VL3-L6-CL-CH1; VL3-CL-L6-VH3-CH1; VL3-CH1-L6-VH3-CL; VH3-CH1-L6-VL3-CL; or VH3-CL-L6-VL3-CH1. In some aspects, the first polypeptide has a structure represented by VH1-L1-VH2-L2-VL2-L3-VL1-L4-CH1 and the second polypeptide has a structure represented by VL3-VH3-CH1; VH3-VL3-CH1; VL3-VH3-CL; VH3-VL3-CL; VL3-VH3-CH1-CL; VH3-VL3-CH1-CL; VL3-VH3-CL-CH1; VH3-VL3-CL-CH1; VL3-CL-VH3-CH1; VL3-CH1-VH3-CL; VH3-CH1-VL3-CL; VH3-CL-VL3-CH1; VL3-L6-VH3-L7-CH1; VH3-L6-VL3-L7-CH1; VL3-L6-VH3-L7-CL; VH3-L6-VL3-L7-CL; VL3-L6-VH3-L7-CH1-L8-CL; VH3-L6-VL3-L7-CH1-L8-CL; VL3-L6-VH3-L7-CL-L8-CH1; VH3-L6-VL3-L7-CL-L8-CH1; VL3-L6-CL-L7-VH3-L8-CH1; VL3-L6-CH1-L7-VH3-L8-CL; VH3-L6-CH1-L7-VL3-L8-CL; VH3-L6-CL-L7-VL3-L8-CH1; VL3-VH3-L6-CH1-CL; VH3-VL3-L6-CH1-CL; VL3-VH3-L6-CL-CH1; VH3-VL3-L6-CL-CH1; VL3-CL-L6-VH3-CH1; VL3-CH1-L6-VH3-CL; VH3-CH1-L6-VL3-CL; or VH3-CL-L6-VL3-CH1. In some aspects, the first polypeptide has a structure represented by VL1-L1-VL2-L2-VH2-L3-VH1-L4-CL and the second polypeptide has a structure represented by VL3-VH3-CH1; VH3-VL3-CH1; VL3-VH3-CL; VH3-VL3-CL; VL3-VH3-CH1-CL; VH3-VL3-CH1-CL; VL3-VH3-CL-CH1; VH3-VL3-CL-CH1; VL3-CL-VH3-CH1; VL3-CH1-VH3-CL; VH3-CH1-VL3-CL; VH3-CL-VL3-CH1; VL3-L6-VH3-L7-CH1; VH3-L6-VL3-L7-CH1; VL3-L6-VH3-L7-CL; VH3-L6-VL3-L7-CL; VL3-L6-VH3-L7-CH1-L8-CL; VH3-L6-VL3-L7-CH1-L8-CL; VL3-L6-VH3-L7-CL-L8-CH1; VH3-L6-VL3-L7-CL-L8-CH1; VL3-L6-CL-L7-VH3-L8-CH1; VL3-L6-CH1-L7-VH3-L8-CL; VH3-L6-CH1-L7-VL3-L8-CL; VH3-L6-CL-L7-VL3-L8-CH1; VL3-VH3-L6-CH1-CL; VH3-VL3-L6-CH1-CL; VL3-VH3-L6-CL-CH1; VH3-VL3-L6-CL-CH1; VL3-CL-L6-VH3-CH1; VL3-CH1-L6-VH3-CL; VH3-CH1-L6-VL3-CL; or VH3-CL-L6-VL3-CH1. In some aspects, the first polypeptide has a structure represented by VH1-L1-VH2-L2-VL2-L3-VL1-L4-CL and the second polypeptide has a structure represented by VL3-VH3-CH1; VH3-VL3-CH1; VL3-VH3-CL; VH3-VL3-CL; VL3-VH3-CH1-CL; VH3-VL3-CH1-CL; VL3-VH3-CL-CH1; VH3-VL3-CL-CH1; VL3-CL-VH3-CH1; VL3-CH1-VH3-CL; VH3-CH1-VL3-CL; VH3-CL-VL3-CH1; VL3-L6-VH3-L7-CH1; VH3-L6-VL3-L7-CH1; VL3-L6-VH3-L7-CL; VH3-L6-VL3-L7-CL; VL3-L6-VH3-L7-CH1-L8-CL; VH3-L6-VL3-L7-CH1-L8-CL; VL3-L6-VH3-L7-CL-L8-CH1; VH3-L6-VL3-L7-CL-L8-CH1; VL3-L6-CL-L7-VH3-L8-CH1; VL3-L6-CH1-L7-VH3-L8-CL; VH3-L6-CH1-L7-VL3-L8-CL; VH3-L6-CL-L7-VL3-L8-CH1; VL3-VH3-L6-CH1-CL; VH3-VL3-L6-CH1-CL; VL3-VH3-L6-CL-CH1; VH3-VL3-L6-CL-CH1; VL3-CL-L6-VH3-CH1; VL3-CH1-L6-VH3-CL; VH3-CH1-L6-VL3-CL; or VH3-CL-L6-VL3-CH1. In some aspects, the first polypeptide has a structure represented by VL1-L1-VL2-L2-VH2-L3-VH1-L4-CH1-L5-CL and the second polypeptide has a structure represented by VL3-VH3-CH1; VH3-VL3-CH1; VL3-VH3-CL; VH3-VL3-CL; VL3-VH3-CH1-CL; VH3-VL3-CH1-CL; VL3-VH3-CL-CH1; VH3-VL3-CL-CH1; VL3-CL-VH3-CH1; VL3-CH1-VH3-CL; VH3-CH1-VL3-CL; VH3-CL-VL3-CH1; VL3-L6-VH3-L7-CH1; VH3-L6-VL3-L7-CH1; VL3-L6-VH3-L7-CL; VH3-L6-VL3-L7-CL; VL3-L6-VH3-L7-CH1-L8-CL; VH3-L6-VL3-L7-CH1-L8-CL; VL3-L6-VH3-L7-CL-L8-CH1; VH3-L6-VL3-L7-CL-L8-CH1; VL3-L6-CL-L7-VH3-L8-CH1; VL3-L6-CH1-L7-VH3-L8-CL; VH3-L6-CH1-L7-VL3-L8-CL; VH3-L6-CL-L7-VL3-L8-CH1; VL3-VH3-L6-CH1-CL; VH3-VL3-L6-CH1-CL; VL3-VH3-L6-CL-CH1; VH3-VL3-L6-CL-CH1; VL3-CL-L6-VH3-CH1; VL3-CH1-L6-VH3-CL; VH3-CH1-L6-VL3-CL; or VH3-CL-L6-VL3-CH1. In some aspects, the first polypeptide has a structure represented by VH1-L1-VH2-L2-VL2-L3-VL1-L4-CH1-L5-CL and the second polypeptide has a structure represented by VL3-VH3-CH1; VH3-VL3-CH1; VL3-VH3-CL; VH3-VL3-CL; VL3-VH3-CH1-CL; VH3-VL3-CH1-CL; VL3-VH3-CL-CH1; VH3-VL3-CL-CH1; VL3-CL-VH3-CH1; VL3-CH1-VH3-CL; VH3-CH1-VL3-CL; VH3-CL-VL3-CH1; VL3-L6-VH3-L7-CH1; VH3-L6-VL3-L7-CH1; VL3-L6-VH3-L7-CL; VH3-L6-VL3-L7-CL; VL3-L6-VH3-L7-CH1-L8-CL; VH3-L6-VL3-L7-CH1-L8-CL; VL3-L6-VH3-L7-CL-L8-CH1; VH3-L6-VL3-L7-CL-L8-CH1; VL3-L6-CL-L7-VH3-L8-CH1; VL3-L6-CH1-L7-VH3-L8-CL; VH3-L6-CH1-L7-VL3-L8-CL; VH3-L6-CL-L7-VL3-L8-CH1; VL3-VH3-L6-CH1-CL; VH3-VL3-L6-CH1-CL; VL3-VH3-L6-CL-CH1; VH3-VL3-L6-CL-CH1; VL3-CL-L6-VH3-CH1; VL3-CH1-L6-VH3-CL; VH3-CH1-L6-VL3-CL; or VH3-CL-L6-VL3-CH1. In some aspects, the first polypeptide has a structure represented by VL1-L1-VL2-L2-VH2-L3-VH1-L4-CL-L5-CH1 and the second polypeptide has a structure represented by VL3-VH3-CH1; VH3-VL3-CH1; VL3-VH3-CL; VH3-VL3-CL; VL3-VH3-CH1-CL; VH3-VL3-CH1-CL; VL3-VH3-CL-CH1; VH3-VL3-CL-CH1; VL3-CL-VH3-CH1; VL3-CH1-VH3-CL; VH3-CH1-VL3-CL; VH3-CL-VL3-CH1; VL3-L6-VH3-L7-CH1; VH3-L6-VL3-L7-CH1; VL3-L6-VH3-L7-CL; VH3-L6-VL3-L7-CL; VL3-L6-VH3-L7-CH1-L8-CL; VH3-L6-VL3-L7-CH1-L8-CL; VL3-L6-VH3-L7-CL-L8-CH1; VH3-L6-VL3-L7-CL-L8-CH1; VL3-L6-CL-L7-VH3-L8-CH1; VL3-L6-CH1-L7-VH3-L8-CL; VH3-L6-CH1-L7-VL3-L8-CL; VH3-L6-CL-L7-VL3-L8-CH1; VL3-VH3-L6-CH1-CL; VH3-VL3-L6-CH1-CL; VL3-VH3-L6-CL-CH1; VH3-VL3-L6-CL-CH1; VL3-CL-L6-VH3-CH1; VL3-CH1-L6-VH3-CL; VH3-CH1-L6-VL3-CL; or VH3-CL-L6-VL3-CH1.

[0218] In other aspects, the invention is directed to an antigen binding polypeptide complex comprising a first polypeptide and a second polypeptide; wherein the first polypeptide has a structure represented by VL1-VL2-VH2-VH1-CH1-Fc; VH1-VH2-VL2-VL1-CH1-Fc; VL1-VL2-VH2-VH1-CL-Fc; VH1-VH2-VL2-VL1-CL-Fc; VL1-VL2-VH2-VH1-CH1-CL-Fc; VH1-VH2-VL2-VL1-CH1-CL-Fc; VL1-VL2-VH2-VH1-CL-CH1-Fc; VH1-VH2-VL2-VL1-CL-CH1-Fc; VL1-L1-VL2-L2-VH2-L3-VH1-L4-CH1-Fc; VH1-L1-VH2-L2-VL2-L3-VL1-L4-CH1-Fc; VL1-L1-VL2-L2-VH2-L3-VH1-L4-CL-Fc; VH1-L1-VH2-L2-VL2-L3-VL1-L4-CL-Fc; VL1-L1-VL2-L2-VH2-L3-VH1-L4-CH1-L5-CL-Fe; VH1-L1-VH2-L2-VL2-L3-VL1-L4-CH-L5-CL-Fc; VL1-L1-VL2-L2-VH2-L3-VH1-L4-CL-L5-CH1-Fc; VH1-L1-VH2-L2-VL2-L3-VL1-L4-CL-L5-CH1-Fc; VL1-L1-VL2-L2-VH2-L3-VH1-L4-CH1-L5-Fc; VH1-L1-VH2-L2-VL2-L3-VL1-L4-CH1-L5-Fc; VL1-L1-VL2-L2-VH2-L3-VH1-L4-CL-L5-Fc; VH1-L1-VH2-L2-VL2-L3-VL1-L4-CL-L5-Fc; VL1-L1-VL2-L2-VH2-L3-VH1-L4-CH1-L5-CL-L6-Fc; VH1-L1-VH2-L2-VL2-L3-VL1-L4-CH1-L5-CL-L6-Fc; VL1-L1-VL2-L2-VH2-L3-VH1-L4-CL-L5-CH1-L6-Fc; or VH1-L1-VH2-L2-VL2-L3-VL1-L4-CL-L5-CH1-L6-Fc; wherein the second polypeptide has a structure represented by VL3-VH3-CH1-Fc; VH3-VL3-CH1-Fc; VL3-VH3-CL-Fc; VH3-VL3-CL-Fc; VL3-VH3-CH1-CL-Fc; VH3-VL3-CH1-CL-Fc; VL3-VH3-CL-CH1-Fc; VH3-VL3-CL-CH1-Fc; VL3-CL-VH3-CH1-Fc; VL3-CH1-VH3-CL-Fc; VH3-CH1-VL3-CL-Fc; VH3-CL-VL3-CH1-Fc; VL3-L7-VH3-L8-CH1-Fc; VH3-L7-VL3-L8-CH1-Fc; VL3-L7-VH3-L8-CL-Fc; VH3-L7-VL3-L8-CL-Fc; VL3-L7-VH3-L8-CH1-L9-CL-Fc; VH3-L7-VL3-L8-CH1-L9-CL-Fc; VL3-L7-VH3-L8-CL-L9-CH1-Fc; VH3-L7-VL3-L8-CL-L9-CH1-Fc; VL3-L7-CL-L8-VH3-L9-CH1-Fc; VL3-L7-CH1-L8-VH3-L9-CL-Fc; VH3-L7-CH1-L8-VL3-L9-CL-Fc; VH3-L7-CL-L8-VL3-L9-CH1-Fe; VL3-L7-VH3-L8-CH1-L9-CL-L10-Fc; VH3-L7-VL3-L8-CH1-L9-CL-L10-Fc; VL3-L7-VH3-L8-CL-L9-CH1-L10-Fe; VH3-L7-VL3-L8-CL-L9-CH1-L10-Fc; VL3-L7-CL-L8-VH3-L9-CH1-L10-Fc; VL3-L7-CH1-L8-VH3-L9-CL-L10-Fe; VH3-L7-CH1-L8-VL3-L9-CL-L10-Fc; VH3-L7-CL-L8-VL3-L9-CH1-L10-Fc; VL3-VH3-L7-CH1-CL-Fc; VH3-VL3-L7-CH1-CL-Fc; VL3-VH3-L7-CL-CH1-Fc; VH3-VL3-L7-CL-CH1-Fc; VL3-CL-L7-VH3-CH1-Fc; VL3-CH1-L7-VH3-CL-Fc; VH3-CH1-L7-VL3-CL-Fc; or VH3-CL-L7-VL3-CH1-Fc; wherein VL1 is a first immunoglobulin light chain variable region that specifically binds to an HIV protein; VL2 is a second immunoglobulin light chain variable region that specifically binds to an HIV protein; VL3 is a third immunoglobulin light chain variable region that specifically binds to an HIV protein; VH1 is a first immunoglobulin heavy chain variable region that specifically binds to an HIV protein; VH2 is a second immunoglobulin heavy chain variable region that specifically binds to an HIV protein; VH3 is a third immunoglobulin heavy chain variable region that specifically binds to an HIV protein; Fc is a region comprising an immunoglobulin heavy chain constant region 2 (CH2), an immunoglobulin heavy chain constant region 3 (CH3), and optionally, an immunoglobulin hinge; CH1 is an immunoglobulin heavy chain constant region 1; CL is an immunoglobulin light chain constant region; and L1, L2, L3, L4, L5, L6, L7, L8, L9 and L10 are amino acid linkers. In some aspects, the first polypeptide has a structure represented by VL1-VL2-VH2-VH1-CH1-Fc; VH1-VH2-VL2-VL1-CH1-Fc; VL1-VL2-VH2-VH1-CL-Fc; VH1-VH2-VL2-VL1-CL-Fc; VL1-VL2-VH2-VH1-CH1-CL-Fc; VH1-VH2-VL2-VL1-CH1-CL-Fc; VL1-VL2-VH2-VH1-CL-CH1-Fc; VH1-VH2-VL2-VL1-CL-CH1-Fc; VL1-L1-VL2-L2-VH2-L3-VH1-L4-CH1-Fc; VH1-L1-VH2-L2-VL2-L3-VL1-L4-CH1-Fc; VL1-L1-VL2-L2-VH2-L3-VH1-L4-CL-Fc; VH1-L1-VH2-L2-VL2-L3-VL1-L4-CL-Fc; VL1-L1-VL2-L2-VH2-L3-VH1-L4-CH1-L5-CL-Fc; VH1-L1-VH2-L2-VL2-L3-VL1-L4-CH1-L5-CL-Fc; VL1-L1-VL2-L2-VH2-L3-VH1-L4-CL-L5-CH1-Fc; VH1-L1-VH2-L2-VL2-L3-VL1-L4-CL-L5-CH1-Fc; VL1-L1-VL2-L2-VH2-L3-VH1-L4-CH1-L5-Fc; VH1-L1-VH2-L2-VL2-L3-VL1-L4-CH1-L5-Fc; VL1-L1-VL2-L2-VH2-L3-VH1-L4-CL-L5-Fc; VH1-L1-VH2-L2-VL2-L3-VL1-L4-CL-L5-Fc; VL1-L1-VL2-L2-VH2-L3-VH1-L4-CH1-L5-CL-L6-Fc; VH1-L1-VH2-L2-VL2-L3-VL1-L4-CH1-L5-CL-L6-Fc; VL1-L1-VL2-L2-VH2-L3-VH1-L4-CL-L5-CH1-L6-Fc; or VH1-L1-VH2-L2-VL2-L3-VL1-L4-CL-L5-CH1-L6-Fc, and the second polypeptide has a structure represented by VL3-VH3-CH1-Fe. In some aspects, the first polypeptide has a structure represented by VL1-VL2-VH2-VH1-CH1-Fc; VH1-VH2-VL2-VL1-CH1-Fc; VL1-VL2-VH2-VH1-CL-Fc; VH1-VH2-VL2-VL1-CL-Fc; VL1-VL2-VH2-VH1-CH1-CL-Fc; VH1-VH2-VL2-VL1-CH1-CL-Fc; VL1-VL2-VH2-VH1-CL-CH1-Fc; VH1-VH2-VL2-VL1-CL-CH1-Fc; VL1-L1-VL2-L2-VH2-L3-VH1-L4-CH1-Fc; VH1-L1-VH2-L2-VL2-L3-VL1-L4-CH1-Fc; VL1-L1-VL2-L2-VH2-L3-VH1-L4-CL-Fc; VH1-L1-VH2-L2-VL2-L3-VL1-L4-CL-Fc; VL1-L1-VL2-L2-VH2-L3-VH1-L4-CH1-L5-CL-Fc; VH1-L1-VH2-L2-VL2-L3-VL1-L4-CH1-L5-CL-Fc; VL1-L1-VL2-L2-VH2-L3-VH1-L4-CL-L5-CH1-Fc; VH1-L1-VH2-L2-VL2-L3-VL1-L4-CL-L5-CH1-Fc; VL1-L1-VL2-L2-VH2-L3-VH1-L4-CH1-L5-Fc; VH1-L1-VH2-L2-VL2-L3-VL1-L4-CH1-L5-Fc; VL1-L1-VL2-L2-VH2-L3-VH1-L4-CL-L5-Fc; VH1-L1-VH2-L2-VL2-L3-VL1-L4-CL-L5-Fc; VL1-L1-VL2-L2-VH2-L3-VH1-L4-CH1-L5-CL-L6-Fc; VH1-L1-VH2-L2-VL2-L3-VL1-L4-CH1-L5-CL-L6-Fc; VL1-L1-VL2-L2-VH2-L3-VH1-L4-CL-L5-CH1-L6-Fc; or VH1-L1-VH2-L2-VL2-L3-VL1-L4-CL-L5-CH1-L6-Fc, and the second polypeptide has a structure represented by VH3-VL3-CH1-Fe. In some aspects, the first polypeptide has a structure represented by VL1-VL2-VH2-VH1-CH1-Fc; VH1-VH2-VL2-VL1-CH1-Fc; VL1-VL2-VH2-VH1-CL-Fc; VH1-VH2-VL2-VL1-CL-Fc; VL1-VL2-VH2-VH1-CH1-CL-Fc; VH1-VH2-VL2-VL1-CH-CL-Fc; VL1-VL2-VH2-VH1-CL-CH1-Fc; VH1-VH2-VL2-VL1-CL-CH1-Fc; VL1-L1-VL2-L2-VH2-L3-VH1-L4-CH1-Fc; VH1-L1-VH2-L2-VL2-L3-VL1-L4-CH1-Fc; VL1-L1-VL2-L2-VH2-L3-VH1-L4-CL-Fc; VH1-L1-VH2-L2-VL2-L3-VL1-L4-CL-Fc; VL1-L1-VL2-L2-VH2-L3-VH1-L4-CH1-L5-CL-Fc; VH1-L1-VH2-L2-VL2-L3-VL1-L4-CH-L5-CL-Fe; VL1-L1-VL2-L2-VH2-L3-VH1-L4-CL-L5-CH1-Fc; VH1-L1-VH2-L2-VL2-L3-VL1-L4-CL-L5-CH1-Fc; VL1-L1-VL2-L2-VH2-L3-VH1-L4-CH-L5-Fc; VH1-L1-VH2-L2-VL2-L3-VL1-L4-CH1-L5-Fc; VL1-L1-VL2-L2-VH2-L3-VH-L4-CL-L5-Fc; VH1-L1-VH2-L2-VL2-L3-VL1-L4-CL-L5-Fc; VL1-L1-VL2-L2-VH2-L3-VH1-L4-CH1-L5-CL-L6-Fc; VH1-L1-VH2-L2-VL2-L3-VL1-L4-CH-L5-CL-L6-Fc; VL1-L1-VL2-L2-VH2-L3-VH1-L4-CL-L5-CH1-L6-Fc; or VH1-L1-VH2-L2-VL2-L3-VL1-L4-CL-L5-CH1-L6-Fc, and the second polypeptide has a structure represented by VL3-VH3-CL-Fc. In some aspects, the first polypeptide has a structure represented by VL1-VL2-VH2-VH1-CH1-Fc; VH1-VH2-VL2-VL1-CH1-Fc; VL1-VL2-VH2-VH1-CL-Fc; VH1-VH2-VL2-VL1-CL-Fc; VL1-VL2-VH2-VH1-CH1-CL-Fc; VH-VH2-VL2-VL1-CH1-CL-Fc; VL1-VL2-VH2-VH1-CL-CH1-Fc; VH1-VH2-VL2-VL1-CL-CH1-Fc; VL1-L1-VL2-L2-VH2-L3-VH1-L4-CH1-Fc; VH1-L1-VH2-L2-VL2-L3-VL1-L4-CH1-Fc; VL1-L1-VL2-L2-VH2-L3-VH1-L4-CL-Fc; VH1-L1-VH2-L2-VL2-L3-VL1-L4-CL-Fc; VL1-L1-VL2-L2-VH2-L3-VH1-L4-CH1-L5-CL-Fc; VH1-L1-VH2-L2-VL2-L3-VL1-L4-CH1-L5-CL-Fc; VL1-L1-VL2-L2-VH2-L3-VH1-L4-CL-L5-CH-Fc; VH1-L1-VH2-L2-VL2-L3-VL1-L4-CL-L5-CH1-Fc; VL1-L1-VL2-L2-VH2-L3-VH1-L4-CH1-L5-Fc; VH1-L1-VH2-L2-VL2-L3-VL1-L4-CH1-L5-Fc; VL1-L1-VL2-L2-VH2-L3-VH1-L4-CL-L5-Fc; VH1-L1-VH2-L2-VL2-L3-VL1-L4-CL-L5-Fc; VL1-L1-VL2-L2-VH2-L3-VH1-L4-CH-L5-CL-L6-Fc; VH1-L1-VH2-L2-VL2-L3-VL1-L4-CH1-L5-CL-L6-Fc; VL1-L1-VL2-L2-VH2-L3-VH-L4-CL-L5-CH-L6-Fc; or VH1-L1-VH2-L2-VL2-L3-VL1-L4-CL-L5-CH1-L6-Fc, and the second polypeptide has a structure represented by VH3-VL3-CL-Fc. In some aspects, the first polypeptide has a structure represented by VL1-VL2-VH2-VH1-CH1-Fc; VH1-VH2-VL2-VL1-CH1-Fc; VL1-VL2-VH2-VH1-CL-Fc; VH1-VH2-VL2-VL1-CL-Fc; VL1-VL2-VH2-VH1-CH1-CL-Fc; VH1-VH2-VL2-VL1-CH1-CL-Fc; VL1-VL2-VH2-VH1-CL-CH1-Fc; VH1-VH2-VL2-VL1-CL-CH1-Fc; VL1-L1-VL2-L2-VH2-L3-VH1-L4-CH-Fc; VH1-L1-VH2-L2-VL2-L3-VL1-L4-CH1-Fc; VL1-L1-VL2-L2-VH2-L3-VH1-L4-CL-Fc; VH1-L1-VH2-L2-VL2-L3-VL1-L4-CL-Fc; VL1-L1-VL2-L2-VH2-L3-VH1-L4-CH1-L5-CL-Fc; VH1-L1-VH2-L2-VL2-L3-VL1-L4-CH1-L5-CL-Fc; VL1-L1-VL2-L2-VH2-L3-VH1-L4-CL-L5-CH1-Fc; VH1-L1-VH2-L2-VL2-L3-VL1-L4-CL-L5-CH1-Fc; VL1-L1-VL2-L2-VH2-L3-VH1-L4-CH1-L5-Fc; VH1-L1-VH2-L2-VL2-L3-VL1-L4-CH1-L5-Fc; VL1-L1-VL2-L2-VH2-L3-VH1-L4-CL-L5-Fc; VH1-L1-VH2-L2-VL2-L3-VL1-L4-CL-L5-Fc; VL1-L1-VL2-L2-VH2-L3-VH1-L4-CH1-L5-CL-L6-Fc; VH1-L1-VH2-L2-VL2-L3-VL1-L4-CH1-L5-CL-L6-Fc; VL1-L1-VL2-L2-VH2-L3-VH1-L4-CL-L5-CH1-L6-Fc; or VH1-L1-VH2-L2-VL2-L3-VL1-L4-CL-L5-CH1-L6-Fc, and the second polypeptide has a structure represented by VL3-VH3-CH1-CL-Fc. In some aspects, the first polypeptide has a structure represented by VL1-VL2-VH2-VH1-CH1-Fc; VH1-VH2-VL2-VL1-CH1-Fc; VL1-VL2-VH2-VH1-CL-Fc; VH1-VH2-VL2-VL1-CL-Fc; VL1-VL2-VH2-VH1-CH1-CL-Fc; VH1-VH2-VL2-VL1-CH1-CL-Fc; VL1-VL2-VH2-VH1-CL-CH1-Fc; VH1-VH2-VL2-VL1-CL-CH1-Fc; VL1-L1-VL2-L2-VH2-L3-VH1-L4-CH1-Fc; VH1-L1-VH2-L2-VL2-L3-VL1-L4-CH1-Fc; VL1-L1-VL2-L2-VH2-L3-VH1-L4-CL-Fc; VH1-L1-VH2-L2-VL2-L3-VL1-L4-CL-Fc; VL1-L1-VL2-L2-VH2-L3-VH1-L4-CH1-L5-CL-Fc; VH1-L1-VH2-L2-VL2-L3-VL1-L4-CH1-L5-CL-Fc; VL1-L1-VL2-L2-VH2-L3-VH1-L4-CL-L5-CH1-Fc; VH1-L1-VH2-L2-VL2-L3-VL1-L4-CL-L5-CH1-Fc; VL1-L1-VL2-L2-VH2-L3-VH1-L4-CH1-L5-Fc; VH1-L1-VH2-L2-VL2-L3-VL1-L4-CH1-L5-Fe; VL1-L1-VL2-L2-VH2-L3-VH1-L4-CL-L5-Fc; VH1-L1-VH2-L2-VL2-L3-VL1-L4-CL-L5-Fc; VL1-L1-VL2-L2-VH2-L3-VH1-L4-CH1-L5-CL-L6-Fc; VH1-L1-VH2-L2-VL2-L3-VL1-L4-CH1-L5-CL-L6-Fc; VL1-L1-VL2-L2-VH2-L3-VH1-L4-CL-L5-CH1-L6-Fc; or VH1-L1-VH2-L2-VL2-L3-VL1-L4-CL-L5-CH1-L6-Fc, and the second polypeptide has a structure represented by VH3-VL3-CH1-CL-Fc. In some aspects, the first polypeptide has a structure represented by VL1-VL2-VH2-VH1-CH1-Fc; VH1-VH2-VL2-VL1-CH1-Fc; VL1-VL2-VH2-VH1-CL-Fc; VH1-VH2-VL2-VL1-CL-Fc; VL1-VL2-VH2-VH1-CH1-CL-Fc; VH1-VH2-VL2-VL1-CH1-CL-Fc; VL1-VL2-VH2-VH1-CL-CH1-Fc; VH1-VH2-VL2-VL1-CL-CH1-Fc; VL1-L1-VL2-L2-VH2-L3-VH1-L4-CH1-Fc; VH1-L1-VH2-L2-VL2-L3-VL1-L4-CH1-Fc; VL1-L1-VL2-L2-VH2-L3-VH1-L4-CL-Fc; VH1-L1-VH2-L2-VL2-L3-VL1-L4-CL-Fc; VL1-L1-VL2-L2-VH2-L3-VH1-L4-CH1-L5-CL-Fc; VH1-L1-VH2-L2-VL2-L3-VL1-L4-CH1-L5-CL-Fc; VL1-L1-VL2-L2-VH2-L3-VH1-L4-CL-L5-CH1-Fc; VH1-L1-VH2-L2-VL2-L3-VL1-L4-CL-L5-CH1-Fc; VL1-L1-VL2-L2-VH2-L3-VH1-L4-CH1-L5-Fc; VH1-L1-VH2-L2-VL2-L3-VL1-L4-CH1-L5-Fc; VL1-L1-VL2-L2-VH2-L3-VH1-L4-CL-L5-Fc; VH1-L1-VH2-L2-VL2-L3-VL1-L4-CL-L5-Fc; VL1-L1-VL2-L2-VH2-L3-VH1-L4-CH1-L5-CL-L6-Fc; VH1-L1-VH2-L2-VL2-L3-VL1-L4-CH1-L5-CL-L6-Fc; VL1-L1-VL2-L2-VH2-L3-VH1-L4-CL-L5-CH-L6-Fc; or VH1-L1-VH2-L2-VL2-L3-VL1-L4-CL-L5-CH1-L6-Fc, and the second polypeptide has a structure represented by VL3-VH3-CL-CH1-Fc. In some aspects, the first polypeptide has a structure represented by VL1-VL2-VH2-VH1-CH1-Fc; VH1-VH2-VL2-VL1-CH1-Fc; VL1-VL2-VH2-VH1-CL-Fc; VH1-VH2-VL2-VL1-CL-Fc; VL1-VL2-VH2-VH1-CH1-CL-Fc; VH1-VH2-VL2-VL1-CH1-CL-Fc; VL1-VL2-VH2-VH1-CL-CH1-Fc; VH1-VH2-VL2-VL1-CL-CH1-Fc; VL1-L1-VL2-L2-VH2-L3-VH1-L4-CH1-Fe; VH1-L1-VH2-L2-VL2-L3-VL1-L4-CH1-Fc; VL1-L1-VL2-L2-VH2-L3-VH1-L4-CL-Fc; VH1-L1-VH2-L2-VL2-L3-VL1-L4-CL-Fc; VL1-L1-VL2-L2-VH2-L3-VH1-L4-CH1-L5-CL-Fc; VH1-L1-VH2-L2-VL2-L3-VL1-L4-CH1-L5-CL-Fc; VL1-L1-VL2-L2-VH2-L3-VH1-L4-CL-L5-CH1-Fc; VH1-L1-VH2-L2-VL2-L3-VL1-L4-CL-L5-CH1-Fc; VL1-L1-VL2-L2-VH2-L3-VH1-L4-CH1-L5-Fc; VH1-L1-VH2-L2-VL2-L3-VL1-L4-CH1-L5-Fc; VL1-L1-VL2-L2-VH2-L3-VH-L4-CL-L5-Fc; VH1-L1-VH2-L2-VL2-L3-VL1-L4-CL-L5-Fc; VL1-L1-VL2-L2-VH2-L3-VH1-L4-CH1-L5-CL-L6-Fc; VH1-L1-VH2-L2-VL2-L3-VL1-L4-CH-L5-CL-L6-Fc; VL1-L1-VL2-L2-VH2-L3-VH1-L4-CL-L5-CH1-L6-Fc; or VH1-L1-VH2-L2-VL2-L3-VL1-L4-CL-L5-CH1-L6-Fc, and the second poiypeptide has a structure represented by VH3-VL3-CL-CH1-Fc. In some aspects, the first polypeptide has a structure represented by VL1-VL2-VH2-VH1-CH1-Fe; VH1-VH2-VL2-VL1-CH1-Fc; VL1-VL2-VH2-VH1-CL-Fc; VH1-VH2-VL2-VL1-CL-Fc; VL1-VL2-VH2-VH1-CH1-CL-Fc; VH1-VH2-VL2-VL1-CH1-CL-Fc; VL1-VL2-VH2-VH1-CL-CH1-Fc; VH1-VH2-VL2-VL1-CL-CH1-Fc; VL1-L1-VL2-L2-VH2-L3-VH1-L4-CH1-Fc; VH1-L1-VH2-L2-VL2-L3-VL1-L4-CH1-Fc; VL1-L1-VL2-L2-VH2-L3-VH1-L4-CL-Fc; VH1-L1-VH2-L2-VL2-L3-VL1-L4-CL-Fc; VL1-L1-VL2-L2-VH2-L3-VH1-L4-CH1-L5-CL-Fc; VH1-L1-VH2-L2-VL2-L3-VL1-L4-CH1-L5-CL-Fc; VL1-L1-VL2-L2-VH2-L3-VH1-L4-CL-L5-CH1-Fc; VH1-L1-VH2-L2-VL2-L3-VL1-L4-CL-L5-CH1-Fc; VL1-L1-VL2-L2-VH2-L3-VH1-L4-CH1-L5-Fc; VH1-L1-VH2-L2-VL2-L3-VL1-L4-CH1-L5-Fc; VL1-L1-VL2-L2-VH2-L3-VH1-L4-CL-L5-Fc; VH1-L1-VH2-L2-VL2-L3-VL1-L4-CL-L5-Fc; VL1-L1-VL2-L2-VH2-L3-VH1-L4-CH1-L5-CL-L6-Fc; VH1-L1-VH2-L2-VL2-L3-VL1-L4-CH1-L5-CL-L6-Fc; VL1-L1-VL2-L2-VH2-L3-VH1-L4-CL-L5-CH1-L6-Fc; or VH1-L1-VH2-L2-VL2-L3-VL1-L4-CL-L5-CH1-L6-Fc, and the second polypeptide has a structure represented by VL3-CL-VH3-CH1-Fc. In some aspects, the first polypeptide has a structure represented by VL1-VL2-VH2-VH1-CH-Fc; VH1-VH2-VL2-VL1-CH1-Fc; VL1-VL2-VH2-VH1-CL-Fc; VH1-VH2-VL2-VL1-CL-Fc; VL1-VL2-VH2-VH1-CH1-CL-Fc; VH1-VH2-VL2-VL1-CH1-CL-Fc; VL1-VL2-VH2-VH1-CL-CH1-Fc; VH1-VH2-VL2-VL1-CL-CH1-Fc; VL1-L1-VL2-L2-VH2-L3-VH1-L4-CH-Fc; VH1-L1-VH2-L2-VL2-L3-VL1-L4-CH1-Fc; VL1-L1-VL2-L2-VH2-L3-VH1-L4-CL-Fc; VH1-L1-VH2-L2-VL2-L3-VL1-L4-CL-Fc; VL1-L1-VL2-L2-VH2-L3-VH-L4-CH-L5-CL-Fc; VH1-L1-VH2-L2-VL2-L3-VL1-L4-CH-L5-CL-Fc; VL1-L1-VL2-L2-VH2-L3-VH1-L4-CL-L5-CH1-Fc; VH1-L1-VH2-L2-VL2-L3-VL1-L4-CL-L5-CH1-Fc; VL1-L1-VL2-L2-VH2-L3-VH-L4-CH-L5-Fc; VH1-L1-VH2-L2-VL2-L3-VL1-L4-CH1-L5-Fc; VL1-L1-VL2-L2-VH2-L3-VH1-L4-CL-L5-Fc; VH1-L1-VH2-L2-VL2-L3-VL1-L4-CL-L5-Fc; VL1-L1-VL2-L2-VH2-L3-VH1-L4-CH1-L5-CL-L6-Fc; VH1-L1-VH2-L2-VL2-L3-VL1-L4-CH1-L5-CL-L6-Fc; VL1-L1-VL2-L2-VH2-L3-VH-L4-CL-L5-CH1-L6-Fc; or VH1-L1-VH2-L2-VL2-L3-VL1-L4-CL-L5-CH1-L6-Fc, and the second polypeptide has a structure represented by VL3-CH1-VH3-CL-Fc. In some aspects, the first polypeptide has a structure represented by VL1-VL2-VH2-VH1-CH1-Fc; VH1-VH2-VL2-VL1-CH1-Fc; VL1-VL2-VH2-VH1-CL-Fc; VH1-VH2-VL2-VL1-CL-Fc; VL1-VL2-VH2-VH1-CH1-CL-Fc; VH1-VH2-VL2-VL1-CH1-CL-Fc; VL1-VL2-VH2-VH1-CL-CH1-Fc; VH1-VH2-VL2-VL1-CL-CH1-Fc; VL1-L1-VL2-L2-VH2-L3-VH1-L4-CH1-Fc; VH1-L1-VH2-L2-VL2-L3-VL1-L4-CH1-Fc; VL1-L1-VL2-L2-VH2-L3-VH1-L4-CL-Fc; VH1-L1-VH2-L2-VL2-L3-VL1-L4-CL-Fc; VL1-L1-VL2-L2-VH2-L3-VH1-L4-CH-L5-CL-Fc; VH1-L1-VH2-L2-VL2-L3-VL1-L4-CH1-L5-CL-Fc; VL1-L1-VL2-L2-VH2-L3-VH1-L4-CL-L5-CH1-Fc; VH1-L1-VH2-L2-VL2-L3-VL1-L4-CL-L5-CH1-Fc; VL1-L1-VL2-L2-VH2-L3-VH1-L4-CH1-L5-Fc; VH1-L1-VH2-L2-VL2-L3-VL1-L4-CH1-L5-Fe; VL1-L1-VL2-L2-VH2-L3-VH-L4-CL-L5-Fc; VH1-L1-VH2-L2-VL2-L3-VL1-L4-CL-L5-Fc; VL1-L1-VL2-L2-VH2-L3-VH1-L4-CH1-L5-CL-L6-Fc; VH1-L1-VH2-L2-VL2-L3-VL1-L4-CH1-L5-CL-L6-Fc; VL1-L1-VL2-L2-VH2-L3-VH1-L4-CL-L5-CH1-L6-Fc; or VH1-L1-VH2-L2-VL2-L3-VL1-L4-CL-L5-CH-L6-Fc, and the second polypeptide has a structure represented by VH3-CH1-VL3-CL-Fc. In some aspects, the first polypeptide has a structure represented by VL1-VL2-H2-V1-CH1-Fc; VH1-V2-VL2-VL1-CH1-Fc; VL1-VL2-VH2-VH1-CL-Fc; VH-VH2-VL2-VL1-CL-Fc; VL1-VL2-VH2-VH-CH1-CL-Fc; VH1-VH2-VL2-VL1-CH1-CL-Fc; VL1-VL2-VH2-VH1-CL-CH1-Fc; VH1-VH2-VL2-VL1-CL-CH1-Fc; VL1-L1-VL2-L2-VH2-L3-VH1-L4-CH1-Fc; VH1-L1-VH2-L2-VL2-L3-VL1-L4-CH1-Fc; VL1-L1-VL2-L2-VH2-L3-VH1-L4-CL-Fc; VH1-L1-VH2-L2-VL2-L3-VL1-L4-CL-Fc; VL1-L1-VL2-L2-VH2-L3-VH1-L4-CH1-L5-CL-Fc; VH1-L1-VH2-L2-VL2-L3-VL1-L4-CH1-L5-CL-Fc; VL1-L1-VL2-L2-VH2-L3-VH1-L4-CL-L5-CH1-Fc; VH1-L1-VH2-L2-VL2-L3-VL1-L4-CL-L5-CH1-Fc; VL1-L1-VL2-L2-VH2-L3-VH1-L4-CH1-L5-Fc; VH1-L1-VH2-L2-VL2-L3-VL1-L4-CH1-L5-Fc; VL1-L1-VL2-L2-VH2-L3-VH1-L4-CL-L5-Fc; VH1-L1-VH2-L2-VL2-L3-VL1-L4-CL-L5-Fc; VL1-L1-VL2-L2-VH2-L3-VH1-L4-CH1-L5-CL-L6-Fc; VH1-L1-VH2-L2-VL2-L3-VL1-L4-CH1-L5-CL-L6-Fc; VL1-L1-VL2-L2-VH2-L3-VH1-L4-CL-L5-CH1-L6-Fc; or VH1-L1-VH2-L2-VL2-L3-VL1-L4-CL-L5-CH1-L6-Fc, and the second polypeptide has a structure represented by VH3-CL-VL3-CH1-Fc. In some aspects, the first polypeptide has a structure represented by VL1-VL2-VH2-VH1-CH1-Fc; VH1-VH2-VL2-VL1-CH1-Fc; VL1-VL2-VH2-VH1-CL-Fc; VH1-VH2-VL2-VL1-CL-Fc; VL1-VL2-VH2-VH1-CH1-CL-Fc; VH1-VH2-VL2-VL1-CH1-CL-Fc; VL1-VL2-VH2-VH1-CL-CH1-Fc; VH1-VH2-VL2-VL1-CL-CH1-Fc; VL1-L1-VL2-L2-VH2-L3-VH1-L4-CH1-Fe; VH1-L1-VH2-L2-VL2-L3-VL1-L4-CH1-Fc; VL1-L1-VL2-L2-VH2-L3-VH1-L4-CL-Fc; VH1-L1-VH2-L2-VL2-L3-VL1-L4-CL-Fc; VL1-L1-VL2-L2-VH2-L3-VH1-L4-CH1-L5-CL-Fc; VH1-L1-VH2-L2-VL2-L3-VL1-L4-CH1-L5-CL-Fc; VL1-L1-VL2-L2-VH2-L3-VH1-L4-CL-L5-CH1-Fc; VH1-L1-VH2-L2-VL2-L3-VL1-L4-CL-L5-CH1-Fc; VL1-L1-VL2-L2-VH2-L3-VH1-L4-CH1-L5-Fc; VH1-L1-VH2-L2-VL2-L3-VL1-L4-CH1-L5-Fc; VL1-L1-VL2-L2-VH2-L3-VH-L4-CL-L5-Fc; VH1-L1-VH2-L2-VL2-L3-VL1-L4-CL-L5-Fc; VL1-L1-VL2-L2-VH2-L3-VH1-L4-CH1-L5-CL-L6-Fc; VH1-L1-VH2-L2-VL2-L3-VL1-L4-CH-L5-CL-L6-Fc; VL1-L1-VL2-L2-VH2-L3-VH1-L4-CL-L5-CH1-L6-Fc; or VH1-L1-VH2-L2-VL2-L3-VL1-L4-CL-L5-CH1-L6-Fc, and the second polypeptide has a structure represented by VL3-L7-VH3-L8-CH1-Fc. In some aspects, the first polypeptide has a structure represented by VL1-VL2-VH2-VH1-CH1-Fc; VH1-VH2-VL2-VL1-CH1-Fc; VL1-VL2-VH2-VH1-CL-Fc; VH1-VH2-VL2-VL1-CL-Fc; VL1-VL2-VH2-VH-CH1-CL-Fc; VH1-VH2-VL2-VL1-CH1-CL-Fc; VL1-VL2-VH2-VH1-CL-CH1-Fc; VH1-VH2-VL2-VL1-CL-CH1-Fc; VL1-L1-VL2-L2-VH2-L3-VH1-L4-CH1-Fc; VH1-L1-VH2-L2-VL2-L3-VL1-L4-CH1-Fc; VL1-L1-VL2-L2-VH2-L3-VH1-L4-CL-Fc; VH1-L1-VH2-L2-VL2-L3-VL1-L4-CL-Fc; VL1-L1-VL2-L2-VH2-L3-VH1-L4-CH-L5-CL-Fe; VH1-L1-VH2-L2-VL2-L3-VL1-L4-CH-L5-CL-Fc; VL1-L1-VL2-L2-VH2-L3-VH1-L4-CL-L5-CH1-Fc; VH1-L1-VH2-L2-VL2-L3-VL1-L4-CL-L5-CH1-Fc; VL1-L1-VL2-L2-VH2-L3-VH1-L4-CH1-L5-Fc; VH1-L1-VH2-L2-VL2-L3-VL1-L4-CH1-L5-Fc; VL1-L1-VL2-L2-VH2-L3-VH1-L4-CL-L5-Fc; VH1-L1-VH2-L2-VL2-L3-VL1-L4-CL-L5-Fc; VL1-L1-VL2-L2-VH2-L3-VH1-L4-CH1-L5-CL-L6-Fc; VH1-L1-VH2-L2-VL2-L3-VL1-L4-CH1-L5-CL-L6-Fc; VL1-L1-VL2-L2-VH2-L3-VH1-L4-CL-L5-CH1-L6-Fc; or VH1-L1-VH2-L2-VL2-L3-VL1-L4-CL-L5-CH1-L6-Fc, and the second polypeptide has a structure represented by VH3-L7-VL3-L8-CH1-Fc. In some aspects, the first polypeptide has a structure represented by VL1-VL2-VH2-VH1-CH1-Fc; VH1-VH2-VL2-VL1-CH1-Fc; VL1-VL2-VH2-VH1-CL-Fc; VH1-VH2-VL2-VL1-CL-Fc; VL1-VL2-VH2-VH1-CH1-CL-Fc; VH1-VH2-VL2-VL1-CH1-CL-Fc; VL1-VL2-VH2-VH1-CL-CH1-Fc; VH1-VH2-VL2-VL1-CL-CH1-Fc; VL1-L1-VL2-L2-VH2-L3-VH1-L4-CH1-Fc; VH1-L1-VH2-L2-VL2-L3-VL1-L4-CH1-Fc; VL1-L1-VL2-L2-VH2-L3-VH1-L4-CL-Fc; VH1-L1-VH2-L2-VL2-L3-VL1-L4-CL-Fc; VL1-L1-VL2-L2-VH2-L3-VH1-L4-CH1-L5-CL-Fc; VH1-L1-VH2-L2-VL2-L3-VL1-L4-CH1-L5-CL-Fc; VL1-L1-VL2-L2-VH2-L3-VH1-L4-CL-L5-CH1-Fc; VH1-L1-VH2-L2-VL2-L3-VL1-L4-CL-L5-CH1-Fc; VL1-L1-VL2-L2-VH2-L3-VH1-L4-CH1-L5-Fc; VH1-L1-VH2-L2-VL2-L3-VL1-L4-CH1-L5-Fc; VL1-L1-VL2-L2-VH2-L3-VH1-L4-CL-L5-Fc; VH1-L1-VH2-L2-VL2-L3-VL1-L4-CL-L5-Fc; VL1-L1-VL2-L2-VH2-L3-VH-L4-CH1-L5-CL-L6-Fc; VH1-L1-VH2-L2-VL2-L3-VL1-L4-CH1-L5-CL-L6-Fc; VL1-L1-VL2-L2-VH2-L3-VH1-L4-CL-L5-CH1-L6-Fe: or VH1-L1-VH2-L2-VL2-L3-VL1-L4-CL-L5-CH1-L6-Fc, and the second polypeptide has a structure represented by VL3-L7-VH3-L8-CL-Fc. In some aspects, the first polypeptide has a structure represented by VL1-VL2-VH2-VH1-CH1-Fc; VH1-VH2-VL2-VL1-CH1-Fc; VL1-VL2-VH2-VH1-CL-Fc; VH1-VH2-VL2-VL1-CL-Fc; VL1-VL2-VH2-VH1-CH1-CL-Fc; VH1-VH2-VL2-VL1-CH1-CL-Fc; VL1-VL2-VH2-VH1-CL-CH1-Fc; VH1-VH2-VL2-VL1-CL-CH1-Fc; VL1-L1-VL2-L2-VH2-L3-VH1-L4-CH1-Fc; VH1-L1-VH2-L2-VL2-L3-VL1-L4-CH1-Fc; VL1-L1-VL2-L2-VH2-L3-VH1-L4-CL-Fc; VH1-L1-VH2-L2-VL2-L3-VL1-L4-CL-Fc; VL1-L1-VL2-L2-VH2-L3-VH1-L4-CH1-L5-CL-Fc; VH1-L1-VH2-L2-VL2-L3-VL1-L4-CH1-L5-CL-Fc; VL1-L1-VL2-L2-VH2-L3-VH1-L4-CL-L5-CH1-Fc; VH1-L1-VH2-L2-VL2-L3-VL1-L4-CL-L5-CH1-Fc; VL1-L1-VL2-L2-VH2-L3-VH1-L4-CH1-L5-Fc; VH1-L1-VH2-L2-VL2-L3-VL1-L4-CH1-L5-Fc; VL1-L1-VL2-L2-VH2-L3-VH1-L4-CL-L5-Fc; VH1-L1-VH2-L2-VL2-L3-VL1-L4-CL-L5-Fc; VL1-L1-VL2-L2-VH2-L3-VH1-L4-CH1-L5-CL-L6-Fc; VH1-L1-VH2-L2-VL2-L3-VL1-L4-CH1-L5-CL-L6-Fc; VL1-L1-VL2-L2-VH2-L3-VH1-L4-CL-L5-CH1-L6-Fc; or VH1-L1-VH2-L2-VL2-L3-VL1-L4-CL-L5-CH1-L6-Fc, and the second polypeptide has a structure represented by VH3-L7-VL3-L8-CL-Fc. In some aspects, the first polypeptide has a structure represented by VL1-VL2-VH2-VH1-CH1-Fc; VH1-VH2-VL2-VL1-CH1-Fc; VL1-VL2-VH2-VH1-CL-Fc; VH1-VH2-VL2-VL1-CL-Fc; VL1-VL2-VH2-VH1-CH1-CL-Fc; VH1-VH2-VL2-VL1-CH1-CL-Fc; VL1-VL2-VH2-VH1-CL-CH1-Fc; VH1-VH2-VL2-VL1-CL-CH1-Fc; VL1-L1-VL2-L2-VH2-L3-VH1-L4-CH1-Fc; VH1-L1-VH2-L2-VL2-L3-VL1-L4-CH1-Fc; VL1-L1-VL2-L2-VH2-L3-VH1-L4-CL-Fc; VH1-L1-VH2-L2-VL2-L3-VL1-L4-CL-Fc; VL1-L1-VL2-L2-VH2-L3-VH1-L4-CH1-L5-CL-Fc; VH1-L1-VH2-L2-VL2-L3-VL1-L4-CH1-L5-CL-Fc; VL1-L1-VL2-L2-VH2-L3-VH1-L4-CL-L5-CH1-Fc; VH1-L1-VH2-L2-VL2-L3-VL1-L4-CL-L5-CH1-Fc; VL1-L1-VL2-L2-VH2-L3-VH1-L4-CH1-L5-Fc; VH1-L1-VH2-L2-VL2-L3-VL1-L4-CH1-L5-Fc; VL1-L1-VL2-L2-VH2-L3-VH1-L4-CL-L5-Fc; VH1-L1-VH2-L2-VL2-L3-VL1-L4-CL-L5-Fc; VL1-L1-VL2-L2-VH2-L3-VH1-L4-CH1-L5-CL-L6-Fc; VH1-L1-VH2-L2-VL2-L3-VL1-L4-CH1-L5-CL-L6-Fc; VL1-L1-VL2-L2-VH2-L3-VH1-L4-CL-L5-CH1-L6-Fc; or VH1-L1-VH2-L2-VL2-L3-VL1-L4-CL-L5-CH1-L6-Fc, and the second polypeptide has a structure represented by VL3-L7-VH3-L8-CH1-L9-CL-Fc. In some aspects, the first polypeptide has a structure represented by VL1-VL2-VH2-VH1-CH1-Fc; VH1-VH2-VL2-VL1-CH1-Fc; VL1-VL2-VH2-VH-CL-Fc; VH1-VH2-VL2-VL1-CL-Fc; VL1-VL2-VH2-VH1-CH1-CL-Fc; VH-VH2-VL2-VL1-CH1-CL-Fc; VL1-VL2-VH2-VH1-CL-CH1-Fc; VH1-VH2-VL2-VL1-CL-CH1-Fc; VL1-L1-VL2-L2-VH2-L3-VH-L4-CH1-Fc; VH1-L1-VH2-L2-VL2-L3-VL1-L4-CH1-Fc; VL1-L1-VL2-L2-VH2-L3-VH1-L4-CL-Fc; VH1-L1-VH2-L2-VL2-L3-VL1-L4-CL-Fc; VL1-L1-VL2-L2-VH2-L3-VH1-L4-CH1-L5-CL-Fc; VH1-L1-VH2-L2-VL2-L3-VL1-L4-CH1-L5-CL-Fc; VL1-L1-VL2-L2-VH2-L3-VH1-L4-CL-L5-CH1-Fc; VH1-L1-VH2-L2-VL2-L3-VL1-L4-CL-L5-CH1-Fc; VL1-L1-VL2-L2-VH2-L3-VH1-L4-CH1-L5-Fc; VH1-L1-VH2-L2-VL2-L3-VL1-L4-CH1-L5-Fe; VL1-L1-VL2-L2-VH2-L3-VH1-L4-CL-L5-Fc; VH1-L1-VH2-L2-VL2-L3-VL1-L4-CL-L5-Fc; VL1-L1-VL2-L2-VH2-L3-VH1-L4-CH1-L5-CL-L6-Fc; VH1-L1-VH2-L2-VL2-L3-VL1-L4-CH1-L5-CL-L6-Fc; VL1-L1-VL2-L2-VH2-L3-VH1-L4-CL-L5-CH1-L6-Fc; or VH1-L1-VH2-L2-VL2-L3-VL1-L4-CL-L5-CH1-L6-Fc, and the second polypeptide has a structure represented by VH3-L7-VL3-L8-CH1-L9-CL-Fe. In some aspects, the first polypeptide has a structure represented by VL1-VL2-VH2-VH1-CH1-Fc; VH1-VH2-VL2-VL1-CH1-Fc; VL1-VL2-VH2-VH1-CL-Fc; VH1-VH2-VL2-VL1-CL-Fc; VL1-VL2-VH2-VH1-CH1-CL-Fc; VH1-VH2-VL2-VL1-CH1-CL-Fc; VL1-VL2-VH2-VH1-CL-CH1-Fc; VH1-VH2-VL2-VL1-CL-CH1-Fc; VL1-L1-VL2-L2-VH2-L3-VH1-L4-CH1-Fc; VH1-L1-VH2-L2-VL2-L3-VL1-L4-CH1-Fc; VL1-L1-VL2-L2-VH2-L3-VH1-L4-CL-Fc; VH1-L1-VH2-L2-VL2-L3-VL1-L4-CL-Fc; VL1-L1-VL2-L2-VH2-L3-VH1-L4-CH1-L5-CL-Fc; VH1-L1-VH2-L2-VL2-L3-VL1-L4-CH1-L5-CL-Fc; VL1-L1-VL2-L2-VH2-L3-VH1-L4-CL-L5-CH1-Fc; VH1-L1-VH2-L2-VL2-L3-VL1-L4-CL-L5-CH1-Fc; VL1-L1-VL2-L2-VH2-L3-VH1-L4-CH1-L5-Fc; VH1-L1-VH2-L2-VL2-L3-VL1-L4-CH1-L5-Fc; VL1-L1-VL2-L2-VH2-L3-VH1-L4-CL-L5-Fc; VH1-L1-VH2-L2-VL2-L3-VL1-L4-CL-L5-Fc; VL1-L1-VL2-L2-VH2-L3-VH1-L4-CH1-L5-CL-L6-Fc; VH1-L1-VH2-L2-VL2-L3-VL1-L4-CH1-L5-CL-L6-Fc; VL1-L1-VL2-L2-VH2-L3-VH1-L4-CL-L5-CH1-L6-Fc; or VH1-L1-VH2-L2-VL2-L3-VL1-L4-CL-L5-CH1-L6-Fc, and the second polypeptide has a structure represented by VL3-L7-VH3-L8-CL-L9-CH1-Fc. In some aspects, the first polypeptide has a structure represented by VL1-VL2-VH2-VH1-CH1-Fc; VH1-VH2-VL2-VL1-CH1-Fc; VL1-VL2-VH2-VH1-CL-Fc; VH1-VH2-VL2-VL1-CL-Fc; VL1-VL2-VH2-VH1-CH1-CL-Fc; VH1-VH2-VL2-VL1-CH1-CL-Fc; VL1-VL2-VH2-VH1-CL-CH1-Fc; VH1-VH2-VL2-VL1-CL-CH1-Fc; VL1-L1-VL2-L2-VH2-L3-VH1-L4-CH1-Fc; VH1-L1-VH2-L2-VL2-L3-VL1-L4-CH1-Fc; VL1-L1-VL2-L2-VH2-L3-VH1-L4-CL-Fc; VH1-L1-VH2-L2-VL2-L3-VL1-L4-CL-Fc; VL1-L1-VL2-L2-VH2-L3-VH1-L4-CH1-L5-CL-Fc; VH1-L1-VH2-L2-VL2-L3-VL1-L4-CH1-L5-CL-Fc; VL1-L1-VL2-L2-VH2-L3-VH1-L4-CL-L5-CH1-Fc; VH1-L1-VH2-L2-VL2-L3-VL1-L4-CL-L5-CH1-Fc; VL1-L1-VL2-L2-VH2-L3-VH1-L4-CH1-L5-Fc; VH1-L1-VH2-L2-VL2-L3-VL1-L4-CH1-L5-Fe; VL1-L1-VL2-L2-VH2-L3-VH1-L4-CL-L5-Fc; VH1-L1-VH2-L2-VL2-L3-VL1-L4-CL-L5-Fc; VL1-L1-VL2-L2-VH2-L3-VH1-L4-CH1-L5-CL-L6-Fc; VH1-L1-VH2-L2-VL2-L3-VL1-L4-CH1-L5-CL-L6-Fc; VL1-L1-VL2-L2-VH2-L3-VH1-L4-CL-L5-CH1-L6-Fc; or VH1-L1-VH2-L2-VL2-L3-VL1-L4-CL-L5-CH1-L6-Fc, and the second polypeptide has a structure represented by VH3-L7-VL3-L8-CL-L9-CH1-Fc. In some aspects, the first polypeptide has a structure represented by VL1-VL2-VH2-VH1-CH1-Fc; VH1-VH2-VL2-VL1-CH1-Fc; VL1-VL2-VH2-VH1-CL-Fc; VH1-VH2-VL2-VL1-CL-Fc; VL1-VL2-VH2-VH1-CH1-CL-Fc; VH1-VH2-VL2-VL1-CH1-CL-Fc; VL1-VL2-VH2-VH1-CL-CH1-Fc; VH1-VH2-VL2-VL1-CL-CH1-Fc; VL1-L1-VL2-L2-VH2-L3-VH1-L4-CH1-Fc; VH1-L1-VH2-L2-VL2-L3-VL1-L4-CH1-Fc; VL1-L1-VL2-L2-VH2-L3-VH1-L4-CL-Fc; VH1-L1-VH2-L2-VL2-L3-VL1-L4-CL-Fc; VL1-L1-VL2-L2-VH2-L3-VH1-L4-CH1-L5-CL-Fc; VH1-L1-VH2-L2-VL2-L3-VL1-L4-CH1-L5-CL-Fc; VL1-L1-VL2-L2-VH2-L3-VH1-L4-CL-L5-CH1-Fc; VH1-L1-VH2-L2-VL2-L3-VL1-L4-CL-L5-CH1-Fc; VL1-L1-VL2-L2-VH2-L3-VH1-L4-CH1-L5-Fc; VH1-L1-VH2-L2-VL2-L3-VL1-L4-CH1-L5-Fc; VL1-L1-VL2-L2-VH2-L3-VH1-L4-CL-L5-Fc; VH1-L1-VH2-L2-VL2-L3-VL1-L4-CL-L5-Fc; VL1-L1-VL2-L2-VH2-L3-VH1-L4-CH1-L5-CL-L6-Fc; VH1-L1-VH2-L2-VL2-L3-VL1-L4-CH1-L5-CL-L6-Fc; VL1-L1-VL2-L2-VH2-L3-VH-L4-CL-L5-CH1-L6-Fc; or VH1--L1-VH2-L2-VL2-L3-VL1-L4-CL-L5-CH1-L6-Fc, and the second polypeptide has a structure represented by VL3-L7-CL-L8-VH3-L9-CH1-Fc. In some aspects, the first polypeptide has a structure represented by VL1-VL2-VH2-VH1-CH1-Fc; VH1-VH2-VL2-VL1-CH1-Fc; VL1-VL2-VH2-VH-CL-Fc; VH1-VH2-VL2-VL1-CL-Fc; VL1-VL2-VH2-VH1-CH1-CL-Fc; VH-VH2-VL2-VL1-CH1-CL-Fc; VL1-VL2-VH2-VH1-CL-CH1-Fc; VH1-VH2-VL2-VL1-CL-CH1-Fc; VL1-L1-VL2-L2-VH2-L3-VH-L4-CH1-Fc; VH1-L1-VH2-L2-VL2-L3-VL1-L4-CH1-Fc; VL1-L1-VL2-L2-VH2-L3-VH1-L4-CL-Fc; VH1-L1-VH2-L2-VL2-L3-VL1-L4-CL-Fc; VL1-L1-VL2-L2-VH2-L3-VH1-L4-CH-L5-CL-Fc; VH1-L1-VH2-L2-VL2-L3-VL1-L4-CH1-L5-CL-Fc; VL1-L1-VL2-L2-VH2-L3-VH1-L4-CL-L5-CH1-Fc; VH1-L1-VH2-L2-VL2-L3-VL1-L4-CL-L5-CH1-Fc; VL1-L1-VL2-L2-VH2-L3-VH1-L4-CH1-L5-Fc; VH1-L1-VH2-L2-VL2-L3-VL1-L4-CH1-L5-Fe; VL1-L1-VL2-L2-VH2-L3-VH1-L4-CL-L5-Fc; VH1-L1-VH2-L2-VL2-L3-VL1-L4-CL-L5-Fc; VL1-L1-VL2-L2-VH2-L3-VH1-L4-CH1-L5-CL-L6-Fc; VH1-L1-VH2-L2-VL2-L3-VL1-L4-CH1-L5-CL-L6-Fc; VL1-L1-VL2-L2-VH2-L3-VH1-L4-CL-L5-CH1-L6-Fc; or VH1-L1-VH2-L2-VL2-L3-VL1-L4-CL-L5-CH1-L6-Fc, and the second polypeptide has a structure represented by VL3-L7-CH1-L8-VH3-L9-CL-Fc. In some aspects, the first polypeptide has a structure represented by VL1-VL2-VH2-VH1-CH1-Fc; VH1-VH2-VL2-VL1-CH1-Fc; VL1-VL2-VH2-VH1-CL-Fc; VH1-VH2-VL2-VL1-CL-Fc; VL1-VL2-VH2-VH1-CH1-CL-Fc; VH1-VH2-VL2-VL1-CH1-CL-Fc; VL1-VL2-VH2-VH1-CL-CH1-Fc; VH1-VH2-VL2-VL1-CL-CH1-Fc; VL1-L1-VL2-L2-VH2-L3-VH1-L4-CH1-Fc; VH1-L1-VH2-L2-VL2-L3-VL1-L4-CH1-Fc; VL1-L1-VL2-L2-VH2-L3-VH1-L4-CL-Fc; VH1-L1-VH2-L2-VL2-L3-VL1-L4-CL-Fc; VL1-L1-VL2-L2-VH2-L3-VH1-L4-CH1-L5-CL-Fc; VH1-L1-VH2-L2-VL2-L3-VL1-L4-CH1-L5-CL-Fc; VL1-L1-VL2-L2-VH2-L3-VH1-L4-CL-L5-CH1-Fc; VH1-L1-VH2-L2-VL2-L3-VL1-L4-CL-L5-CH1-Fc; VL1-L1-VL2-L2-VH2-L3-VH1-L4-CH1-L5-Fc; VH1-L1-VH2-L2-VL2-L3-VL1-L4-CH1-L5-Fc; VL1-L1-VL2-L2-VH2-L3-VH1-L4-CL-L5-Fc; VH1-L1-VH2-L2-VL2-L3-VL1-L4-CL-L5-Fc; VL1-L1-VL2-L2-VH2-L3-VH1-L4-CH1-L5-CL-L6-Fc; VH1-L1-VH2-L2-VL2-L3-VL1-L4-CH1-L5-CL-L6-Fc; VL1-L1-VL2-L2-VH2-L3-VH1-L4-CL-L5-CH1-L6-Fc; or VH1-L1-VH2-L2-VL2-L3-VL1-L4-CL-L5-CH1-L6-Fc, and the second polypeptide has a structure represented by VH3-L7-CH1-L8-VL3-L9-CL-Fc. In some aspects, the first polypeptide has a structure represented by VL1-VL2-VH2-VH1-CH1-Fc; VH1-VH2-VL2-VL1-CH1-Fc; VL1-VL2-VH2-VH1-CL-Fc; VH1-VH2-VL2-VL1-CL-Fc; VL1-VL2-VH2-VH1-CH1-CL-Fc; VH1-VH2-VL2-VL1-CH1-CL-Fc; VL1-VL2-VH2-VH1-CL-CH1-Fc; VH1-VH2-VL2-VL1-CL-CH1-Fc; VL1-L1-VL2-L2-VH2-L3-VH1-L4-CH1-Fc; VH1-L1-VH2-L2-VL2-L3-VL1-L4-CH1-Fc; VL1-L1-VL2-L2-VH2-L3-VH1-L4-CL-Fc; VH1-L1-VH2-L2-VL2-L3-VL1-L4-CL-Fc; VL1-L1-VL2-L2-VH2-L3-VH1-L4-CH1-L5-CL-Fc; VH1-L1-VH2-L2-VL2-L3-VL1-L4-CH1-L5-CL-Fc; VL1-L1-VL2-L2-VH2-L3-VH1-L4-CL-L5-CH1-Fc; VH1-L1-VH2-L2-VL2-L3-VL1-L4-CL-L5-CH1-Fc; VL1-L1-VL2-L2-VH2-L3-VH1-L4-CH1-L5-Fc; VH1-L1-VH2-L2-VL2-L3-VL1-L4-CH1-L5-Fe; VL1-L1-VL2-L2-VH2-L3-VH1-L4-CL-L5-Fc; VH1-L1-VH2-L2-VL2-L3-VL1-L4-CL-L5-Fc; VL1-L1-VL2-L2-VH2-L3-VH1-L4-CH1-L5-CL-L6-Fc; VH1-L1-VH2-L2-VL2-L3-VL1-L4-CH1-L5-CL-L6-Fc; VL1-L1-VL2-L2-VH2-L3-VH1-L4-CL-L5-CH1-L6-Fc; or VH1-L1-VH2-L2-VL2-L3-VL1-L4-CL-L5-CH1-L6-Fc, and the second polypeptide has a structure represented by VH3-L7-CL-L8-VL3-L9-CH1-Fc. In some aspects, the first polypeptide has a structure represented by VL1-VL2-VH2-VH1-CH1-Fc; VH1-VH2-VL2-VL1-CH1-Fc; VL1-VL2-VH2-VH1-CL-Fc; VH1-VH2-VL2-VL1-CL-Fc; VL1-VL2-VH2-VH1-CH1-CL-Fc; VH1-VH2-VL2-VL1-CH1-CL-Fc; VL1-VL2-VH2-VH1-CL-CH1-Fc; VH1-VH2-VL2-VL1-CL-CH1-Fc; VL1-L1-VL2-L2-VH2-L3-VH1-L4-CH1-Fc; VH1-L1-VH2-L2-VL2-L3-VL1-L4-CH1-Fc; VL1-L1-VL2-L2-VH2-L3-VH1-L4-CL-Fc; VH1-L1-VH2-L2-VL2-L3-VL1-L4-CL-Fc; VL1-L1-VL2-L2-VH2-L3-VH1-L4-CH1-L5-CL-Fc; VH1-L1-VH2-L2-VL2-L3-VL1-L4-CH1-L5-CL-Fc; VL1-L1-VL2-L2-VH2-L3-VH1-L4-CL-L5-CH1-Fc; VH1-L1-VH2-L2-VL2-L3-VL1-L4-CL-L5-CH1-Fc; VL1-L1-VL2-L2-VH2-L3-VH1-L4-CH1-L5-Fc; VH1-L1-VH2-L2-VL2-L3-VL1-L4-CH1-L5-Fc; VL1-L1-VL2-L2-VH2-L3-VH1-L4-CL-L5-Fc; VH1-L1-VH2-L2-VL2-L3-VL1-L4-CL-L5-Fc; VL1-L1-VL2-L2-VH2-L3-VH1-L4-CH1-L5-CL-L6-Fc; VH1-L1-VH2-L2-VL2-L3-VL1-L4-CH1-L5-CL-L6-Fc; VL1-L1-VL2-L2-VH2-L3-VH-L4-CL-L5-CH1-L6-Fc; or VH1-L1-VH2-L2-VL2-L3-VL1-L4-CL-L5-CH1-L6-Fc, and the second polypeptide has a structure represented by VL3-L7-VH3-L8-CH1-L9-CL-L10-Fc. In some aspects, the first polypeptide has a structure represented by VL1-VL2-VH2-VH1-CH1-Fc; VH1-VH2-VL2-VL1-CH1-Fc; VL1-VL2-VH2-VH1-CL-Fc; VH1-VH2-VL2-VL1-CL-Fc; VL1-VL2-VH2-VH1-CH1-CL-Fc; VH1-VH2-VL2-VL1-CH1-CL-Fc; VL1-VL2-VH2-VH1-CL-CH1-Fc; VH1-VH2-VL2-VL1-CL-CH1-Fc; VL1-L1-VL2-L2-VH2-L3-VH1-L4-CH1-Fc; VH1-L1-VH2-L2-VL2-L3-VL1-L4-CH1-Fc; VL1-L1-VL2-L2-VH2-L3-VH1-L4-CL-Fc; VH1-L1-VH2-L2-VL2-L3-VL1-L4-CL-Fc; VL1-L1-VL2-L2-VH2-L3-VH1-L4-CH1-L5-CL-Fc; VH1-L1-VH2-L2-VL2-L3-VL1-L4-CH1-L5-CL-Fc; VL1-L1-VL2-L2-VH2-L3-VH1-L4-CL-L5-CH1-Fc; VH1-L1-VH2-L2-VL2-L3-VL1-L4-CL-L5-CH1-Fc; VL1-L1-VL2-L2-VH2-L3-VH1-L4-CH1-L5-Fc; VH1-L1-VH2-L2-VL2-L3-VL1-L4-CH1-L5-Fc; VL1-L1-VL2-L2-VH2-L3-VH1-L4-CL-L5-Fc; VH1-L1-VH2-L2-VL2-L3-VL1-L4-CL-L5-Fc; VL1-L1-VL2-L2-VH2-L3-VH1-L4-CH1-L5-CL-L6-Fc; VH1-L1-VH2-L2-VL2-L3-VL1-L4-CH1-L5-CL-L6-Fc; VL1-L1-VL2-L2-VH2-L3-VH1-L4-CL-L5-CH1-L6-Fc; or VH1-L1-VH2-L2-VL2-L3-VL1-L4-CL-L5-CH1-L6-Fc, and the second polypeptide has a structure represented by VH3-L7-VL3-L8-CH1-L9-CL-L10-Fc. In some aspects, the first polypeptide has a structure represented by VL1-VL2-VH2-VH1-CH1-Fc; VIII-VH2-VL2-VL1-CH1-Fc; VL1-VL2-VH2-VH1-CL-Fe; VH1-VH2-VL2-VL1-CL-Fc; VL1-VL2-VH2-VH1-CH1-CL-Fc; VH1-VH2-VL2-VL1-CH1-CL-Fc; VL1-VL2-VH2-VH1-CL-CH1-Fc; VH1-VH2-VL2-VL1-CL-CH1-Fc; VL1-L1-VL2-L2-VH2-L3-VH1-L4-CH1-Fc; VH1-L1-VH2-L2-VL2-L3-VL1-L4-CH1-Fc; VL1-L1-VL2-L2-VH2-L3-VH1-L4-CL-Fc; VH1-L1-VH2-L2-VL2-L3-VL1-L4-CL-Fc; VL1-L1-VL2-L2-VH2-L3-VH1-L4-CH1-L5-CL-Fc; VH1-L1-VH2-L2-VL2-L3-VL1-L4-CH1-L5-CL-Fc; VL1-L1-VL2-L2-VH2-L3-VH1-L4-CL-L5-CH1-Fc; VH1-L1-VH2-L2-VL2-L3-VL1-L4-CL-L5-CH1-Fc; VL1-L1-VL2-L2-VH2-L3-VH1-L4-CH1-L5-Fc; VH1-L1-VH2-L2-VL2-L3-VL1-L4-CH1-L5-Fc; VL1-L1-VL2-L2-VH2-L3-VH1-L4-CL-L5-Fc; VH1-L1-VH2-L2-VL2-L3-VL1-L4-CL-L5-Fc; VL1-L1-VL2-L2-VH2-L3-VH1-L4-CH1-L5-CL-L6-Fc; VH1-L1-VH2-L2-VL2-L3-VL1-L4-CH1-L5-CL-L6-Fc; VL1-L1-VL2-L2-VH2-L3-VH1-L4-CL-L5-CH1-L6-Fc; or VH1-L1-VH2-L2-VL2-L3-VL1-L4-CL-L5-CH1-L6-Fc, and the second polypeptide has a structure represented by VL3-L7-VH3-L8-CL-L9-CH1-L10-Fc. In some aspects, the first polypeptide has a structure represented by VL1-VL2-VH2-VH1-CH1-Fc; VH1-VH2-VL2-VL1-CH1-Fc; VL1-VL2-VH2-VH1-CL-Fc; VH1-VH2-VL2-VL1-CL-Fc; VL1-VL2-VH2-VH1-CH1-CL-Fc; VH1-VH2-VL2-VL1-CH1-CL-Fc; VL1-VL2-VH2-VH1-CL-CH1-Fc; VH1-VH2-VL2-VL1-CL-CH1-Fc; VL1-L1-VL2-L2-VH2-L3-VH1-L4-CH1-Fc; VH1-L1-VH2-L2-VL2-L3-VL1-L4-CH1-Fc; VL1-L1-VL2-L2-VH2-L3-VH1-L4-CL-Fc; VH1-L1-VH2-L2-VL2-L3-VL1-L4-CL-Fc; VL1-L1-VL2-L2-VH2-L3-VH1-L4-CH1-L5-CL-Fc; VH1-L1-VH2-L2-VL2-L3-VL1-L4-CH1-L5-CL-Fc; VL1-L1-VL2-L2-VH2-L3-VH1-L4-CL-L5-CH1-Fc; VH1-L1-VH2-L2-VL2-L3-VL1-L4-CL-L5-CH1-Fc; VL1-L1-VL2-L2-VH2-L3-VH1-L4-CH1-L5-Fc; VH1-L1-VH2-L2-VL2-L3-VL1-L4-CH1-L5-Fc; VL1-L1-VL2-L2-VH2-L3-VH1-L4-CL-L5-Fc; VH1-L1-VH2-L2-VL2-L3-VL1-L4-CL-L5-Fc; VL1-L1-VL2-L2-VH2-L3-VH1-L4-CH1-L5-CL-L6-Fc; VH1-L1-VH2-L2-VL2-L3-VL1-L4-CH1-L5-CL-L6-Fc; VL1-L1-VL2-L2-VH2-L3-VH1-L4-CL-L5-CH1-L6-Fc; or VH1-L1-VH2-L2-VL2-L3-VL1-L4-CL-L5-CH1-L6-Fc, and the second polypeptide has a structure represented by VH3-L7-VL3-L8-CL-L9-CH1-L10-Fc. In some aspects, the first polypeptide has a structure represented by VL1-VL2-VH2-VH1-CH1-Fc; VH-VH2-VL2-VL1-CH1-Fc; VL1-VL2-VH2-VH1-CL-Fc; VH1-VH2-VL2-VL1-CL-Fc; VL1-VL2-VH2-VH1-CH1-CL-Fc; VH1-VH2-VL2-VL1-CH1-CL-Fc; VL1-VL2-VH2-VH1-CL-CH1-Fc; VH1-VH2-VL2-VL1-CL-CH1-Fc; VL1-L1-VL2-L2-VH2-L3-VH1-L4-CH1-Fc; VH1-L1-VH2-L2-VL2-L3-VL1-L4-CH1-Fc; VL1-L1-VL2-L2-VH2-L3-VH1-L4-CL-Fc; VH1-L1-VH2-L2-VL2-L3-VL1-L4-CL-Fc; VL1-L1-VL2-L2-VH2-L3-VH1-L4-CH1-L5-CL-Fc; VH1-L1-VH2-L2-VL2-L3-VL1-L4-CH1-L5-CL-Fc; VL1-L1-VL2-L2-VH2-L3-VH1-L4-CL-L5-CH1-Fc; VH1-L1-VH2-L2-VL2-L3-VL1-L4-CL-L5-CH1-Fc; VL1-L1-VL2-L2-VH2-L3-VH1-L4-CH1-L5-Fc; VH1-L1-VH2-L2-VL2-L3-VL1-L4-CH1-L5-Fc; VL1-L1-VL2-L2-VH2-L3-VH1-L4-CL-L5-Fc; VH1-L1-VH2-L2-VL2-L3-VL1-L4-CL-L5-Fc; VL1-L1-VL2-L2-VH2-L3-VH1-L4-CH1-L5-CL-L6-Fc; VH1-L1-VH2-L2-VL2-L3-VL1-L4-CH-L5-CL-L6-Fc; VL1-L1-VL2-L2-VH2-L3-VH1-L4-CL-L5-CH1-L6-Fc; or VH1-L1-VH2-L2-VL2-L3-VL1-L4-CL-L5-CH1-L6-Fc, and the second polypeptide has a structure represented by VL3-L7-CL-L8-VH3-L9-CH1-L10-Fc. In some aspects, the first polypeptide has a structure represented by VL1-VL2-VH2-VH1-CH1-Fc; VH1-VH2-VL2-VL1-CH1-Fc; VL1-VL2-VH2-VH1-CL-Fc; VH1-VH2-VL2-VL1-CL-Fc; VL1-VL2-VH2-VH1-CH1-CL-Fc; VH1-VH2-VL2-VL1-CH1-CL-Fc; VL1-VL2-VH2-VH1-CL-CH1-Fc; VH-VH2-VL2-VL1-CL-CH1-Fc; VL1-L1-VL2-L2-VH2-L3-VH1-L4-CH1-Fc; VH1-L1-VH2-L2-VL2-L3-VL1-L4-CH1-Fc; VL1-L1-VL2-L2-VH2-L3-VH1-L4-CL-Fc; VH1-L1-VH2-L2-VL2-L3-VL1-L4-CL-Fc; VL1-L1-VL2-L2-VH2-L3-VH1-L4-CH1-L5-CL-Fc; VH1-L1-VH2-L2-VL2-L3-VL1-L4-CH1-L5-CL-Fc; VL1-L1-VL2-L2-VH2-L3-VH1-L4-CL-L5-CH1-Fc; VH1-L1-VH2-L2-VL2-L3-VL1-L4-CL-L5-CH1-Fc; VL1-L1-VL2-L2-VH2-L3-VH1-L4-CH1-L5-Fc; VH1-L1-VH2-L2-VL2-L3-VL1-L4-CH1-L5-Fc; VL1-L1-VL2-L2-VH2-L3-VH1-L4-CL-L5-Fc; VH1-L1-VH2-L2-VL2-L3-VL1-L4-CL-L5-Fc; VL1-L1-VL2-L2-VH2-L3-VH1-L4-CH1-L5-CL-L6-Fc; VH1-L1-VH2-L2-VL2-L3-VL1-L4-CH1-L5-CL-L6-Fc; VL1-L1-VL2-L2-VH2-L3-VH1-L4-CL-L5-CH1-L6-Fc; or VH1-L1-VH2-L2-VL2-L3-VL1-L4-CL-L5-CH1-L6-Fc, and the second polypeptide has a structure represented by VL3-L7-CH1-L8-VH3-L9-CL-L10-Fc. In some aspects, the first polypeptide has a structure represented by VL1-VL2-VH2-VH1-CH1-Fc; VH1-VH2-VL2-VL1-CH1-Fc; VL1-VL2-VH2-VH1-CL-Fc; VH1-VH2-VL2-VL1-CL-Fc; VL1-VL2-VH2-VH1-CH1-CL-Fc; VH1-VH2-VL2-VL1-CH1-CL-Fc; VL1-VL2-VH2-VH1-CL-CH1-Fc; VH1-VH2-VL2-VL1-CL-CH1-Fc; VL1-L1-VL2-L2-VH2-L3-VH-L4-CH-Fc; VH1-L1-VH2-L2-VL2-L3-VL1-L4-CH1-Fc; VL1-L1-VL2-L2-VH2-L3-VH1-L4-CL-Fc; VH1-L1-VH2-L2-VL2-L3-VL1-L4-CL-Fc; VL1-L1-VL2-L2-VH2-L3-VH1-L4-CH1-L5-CL-Fc; VH1-L1-VH2-L2-VL2-L3-VL1-L4-CH1-L5-CL-Fc; VL1-L1-VL2-L2-VH2-L3-VH1-L4-CL-L5-CH1-Fc; VH1-L1-VH2-L2-VL2-L3-VL1-L4-CL-L5-CH1-Fc; VL1-L1-VL2-L2-VH2-L3-VH1-L4-CH1-L5-Fc; VH1-L1-VH2-L2-VL2-L3-VL1-L4-CH1-L5-Fc; VL1-L1-VL2-L2-VH2-L3-VH1-L4-CL-L5-Fc; VH1-L1-VH2-L2-VL2-L3-VL1-L4-CL-L5-Fc; VL1-L1-VL2-L2-VH2-L3-VH1-L4-CH1-L5-CL-L6-Fc; VH1-L1-VH2-L2-VL2-L3-VL1-L4-CH1-L5-CL-L6-Fc; VL1-L1-VL2-L2-VH2-L3-VH1-L4-CL-L5-CH1-L6-Fc; or VH1-L1-VH2-L2-VL2-L3-VL1-L4-CL-L5-CH1-L6-Fc, and the second polypeptide has a structure represented by VH3-L7-CH1-L8-VL3-L9-CL-L10-Fe. In some aspects, the first polypeptide has a structure represented by VL1-VL2-VH2-VH1-CH1-Fc; VH-VH2-VL2-VL1-CH1-Fc; VL1-VL2-VH2-VH1-CL-Fc; VH1-VH2-VL2-VL1-CL-Fc; VL1-VL2-VH2-VH1-CH1-CL-Fc; VH1-VH2-VL2-VL1-CH1-CL-Fc; VL1-VL2-VH2-VH-CL-CH1-Fc; VH1-VH2-VL2-VL1-CL-CH1-Fc; VL1-L1-VL2-L2-VH2-L3-VH1-L4-CH-Fc; VH1-L1-VH2-L2-VL2-L3-VL1-L4-CH1-Fc; VL1-L1-VL2-L2-VH2-L3-VH1-L4-CL-Fc; VH1-L1-VH2-L2-VL2-L3-VL1-L4-CL-Fc; VL1-L1-VL2-L2-VH2-L3-VH-L4-CH-L5-CL-Fc; VH1-L1-VH2-L2-VL2-L3-VL1-L4-CH1-L5-CL-Fc; VL1-L1-VL2-L2-VH2-L3-VH1-L4-CL-L5-CH1-Fc; VH1-L1-VH2-L2-VL2-L3-VL1-L4-CL-L5-CH1-Fc; VL1-L1-VL2-L2-VH2-L3-VH-L4-CH1-L5-Fc; VH1-L1-VH2-L2-VL2-L3-VL1-L4-CH1-L5-Fc; VL1-L1-VL2-L2-VH2-L3-VH1-L4-CL-L5-Fc; VH1-L1-VH2-L2-VL2-L3-VL1-L4-CL-L5-Fc; VL1-L1-VL2-L2-VH2-L3-VH1-L4-CH1-L5-CL-L6-Fc; VH1-L1-VH2-L2-VL2-L3-VL1-L4-CH1-L5-CL-L6-Fc; VL1-L1-VL2-L2-VH2-L3-VH-L4-CL-L5-CH1-L6-Fc; or VH1-L1-VH2-L2-VL2-L3-VL1-L4-CL-L5-CH1-L6-Fc, and the second polypeptide has a structure represented by VH3-L7-CL-L8-VL3-L9-CH1-L10-Fc. In some aspects, the first polypeptide has a structure represented by VL1-VL2-VH2-VH1-CH1-Fc; VH1-VH2-VL2-VL1-CH1-Fc; VL1-VL2-VH2-VH1-CL-Fc; VH1-VH2-VL2-VL1-CL-Fc; VL1-VL2-VH2-VH1-CH1-CL-Fc; VH-VH2-VL2-VL1-CH1-CL-Fc; VL1-VL2-VH2-VH1-CL-CH1-Fc; VH1-VH2-VL2-VL1-CL-CH1-Fc; VL1-L1-VL2-L2-VH2-L3-VH1-L4-CH1-Fc; VH1-L1-VH2-L2-VL2-L3-VL1-L4-CH1-Fc; VL1-L1-VL2-L2-VH2-L3-VH1-L4-CL-Fc; VH1-L1-VH2-L2-VL2-L3-VL1-L4-CL-Fc; VL1-L1-VL2-L2-VH2-L3-VH1-L4-CH1-L5-CL-Fc; VH1-L1-VH2-L2-VL2-L3-VL1-L4-CH1-L5-CL-Fc; VL1-L1-VL2-L2-VH2-L3-VH1-L4-CL-L5-CH1-Fc; VH1-L1-VH2-L2-VL2-L3-VL1-L4-CL-L5-CH1-Fc; VL1-L1-VL2-L2-VH2-L3-VH1-L4-CH1-L5-Fc; VH1-L1-VH2-L2-VL2-L3-VL1-L4-CH1-L5-Fc; VL1-L1-VL2-L2-VH2-L3-VH1-L4-CL-L5-Fc; VH1-L1-VH2-L2-VL2-L3-VL1-L4-CL-L5-Fc; VL1-L1-VL2-L2-VH2-L3-VH1-L4-CH1-L5-CL-L6-Fc; VH1-L1-VH2-L2-VL2-L3-VL1-L4-CH1-L5-CL-L6-Fc; VL1-L1-VL2-L2-VH2-L3-VH1-L4-CL-L5-CH1-L6-Fc; or VH1-L1-VH2-L2-VL2-L3-VL1-L4-CL-L5-CH1-L6-Fc, and the second polypeptide has a structure represented by VL3-VH3-L7-CH1-CL-Fe. In some aspects, the first polypeptide has a structure represented by VL1-VL2-VH2-VH1-CH1-Fc; VH1-VH2-VL2-VL1-CH1-Fc; VL1-VL2-VH2-VH1-CL-Fc; VH1-VH2-VL2-VL1-CL-Fc; VL1-VL2-VH2-VH1-CH1-CL-Fc; VH1-VH2-VL2-VL1-CH1-CL-Fc; VL1-VL2-VH2-VH-CL-CH1-Fc; VH1-VH2-VL2-VL1-CL-CH1-Fc; VL1-L1-VL2-L2-VH2-L3-VH1-L4-CH1-Fc; VH1-L1-VH2-L2-VL2-L3-VL1-L4-CH1-Fc; VL1-L1-VL2-L2-VH2-L3-VH1-L4-CL-Fc; VH1-L1-VH2-L2-VL2-L3-VL1-L4-CL-Fc; VL1-L1-VL2-L2-VH2-L3-VH1-L4-CH1-L5-CL-Fc; VH1-L1-VH2-L2-VL2-L3-VL1-L4-CH1-L5-CL-Fc; VL1-L1-VL2-L2-VH2-L3-VH1-L4-CL-L5-CH1-Fc; VH1-L1-VH2-L2-VL2-L3-VL1-L4-CL-L5-CH1-Fc; VL1-L1-VL2-L2-VH2-L3-VH1-L4-CH1-L5-Fc; VH1-L1-VH2-L2-VL2-L3-VL1-L4-CH1-L5-Fc; VL1-L1-VL2-L2-VH2-L3-VH1-L4-CL-L5-Fc; VH1-L1-VH2-L2-VL2-L3-VL1-L4-CL-L5-Fc; VL1-L1-VL2-L2-VH2-L3-VH1-L4-CH1-L5-CL-L6-Fc; VH1-L1-VH2-L2-VL2-L3-VL1-L4-CH1-L5-CL-L6-Fc; VL1-L1-VL2-L2-VH2-L3-VH1-L4-CL-L5-CH1-L6-Fc; or VH1-L1-VH2-L2-VL2-L3-VL1-L4-CL-L5-CH1-L6-Fc, and the second polypeptide has a structure represented by VH3-VL3-L7-CH1-CL-Fc. In some aspects, the first polypeptide has a structure represented by VL1-VL2-VH2-VH1-CH1-Fc; VH1-VH2-VL2-VL1-CH1-Fc; VL1-VL2-VH2-VH1-CL-Fc; VH-VH2-VL2-VL1-CL-Fc; VL1-VL2-VH2-VH-CH1-CL-Fc; VH1-VH2-VL2-VL1-CH1-CL-Fc; VL1-VL2-VH2-VH-CL-CH1-Fc; VH1-VH2-VL2-VL1-CL-CH1-Fc; VL1-L1-VL2-L2-VH2-L3-VH1-L4-CH1-Fc; VH1-L1-VH2-L2-VL2-L3-VL1-L4-CH1-Fc; VL1-L1-VL2-L2-VH2-L3-VH1-L4-CL-Fc; VH1-L1-VH2-L2-VL2-L3-VL1-L4-CL-Fc; VL1-L1-VL2-L2-VH2-L3-VH1-L4-CH1-L5-CL-Fc; VH1-L1-VH2-L2-VL2-L3-VL1-L4-CH1-L5-CL-Fc; VL1-L1-VL2-L2-VH2-L3-VH1-L4-CL-L5-CH1-Fc; VH1-L1-VH2-L2-VL2-L3-VL1-L4-CL-L5-CH1-Fc; VL1-L1-VL2-L2-VH2-L3-VH-L4-CH1-L5-Fc; VH1-L1-VH2-L2-VL2-L3-VL1-L4-CH1-L5-Fc; VL1-L1-VL2-L2-VH2-L3-VH-L4-CL-L5-Fc; VH1-L1-VH2-L2-VL2-L3-VL1-L4-CL-L5-Fc; VL1-L1-VL2-L2-VH2-L3-VH-L4-CH-L5-CL-L6-Fc; VH1-L1-VH2-L2-VL2-L3-VL1-L4-CH1-L5-CL-L6-Fc; VL1-L1-VL2-L2-VH2-L3-VH-L4-CL-L5-CH1-L6-Fc; or VH1-L1-VH2-L2-VL2-L3-VL1-L4-CL-L5-CH1-L6-Fc, and the second polypeptide has a structure represented by VL3-VH3-L7-CL-CH1-Fc. In some aspects, the first polypeptide has a structure represented by VL1-VL2-VH2-VH1-CH1-Fc; VH1-VH2-VL2-VL1-CH1-Fc; VL1-VL2-VH2-VH-CL-Fc; VH-VH2-VL2-VL1-CL-Fc; VL1-VL2-VH2-VH1-CH1-CL-Fc; VH1-VH2-VL2-VL1-CH1-CL-Fc; VL1-VL2-VH2-VH1-CL-CH1-Fc; VH1-VH2-VL2-VL1-CL-CH1-Fc; VL1-L1-VL2-L2-VH2-L3-VH1-L4-CH1-Fc; VH1-L1-VH2-L2-VL2-L3-VL1-L4-CH1-Fc; VL1-L1-VL2-L2-VH2-L3-VH1-L4-CL-Fc; VH1-L1-VH2-L2-VL2-L3-VL1-L4-CL-Fc; VL1-L1-VL2-L2-VH2-L3-VH1-L4-CH1-L5-CL-Fc; VH1-L1-VH2-L2-VL2-L3-VL1-L4-CH1-L5-CL-Fc; VL1-L1-VL2-L2-VH2-L3-VH1-L4-CL-L5-CH1-Fc; VH1-L1-VH2-L2-VL2-L3-VL1-L4-CL-L5-CH1-Fc; VL1-L1-VL2-L2-VH2-L3-VH1-L4-CH1-L5-Fc; VH1-L1-VH2-L2-VL2-L3-VL1-L4-CH1-L5-Fc; VL1-L1-VL2-L2-VH2-L3-VH1-L4-CL-L5-Fc; VH1-L1-VH2-L2-VL2-L3-VL1-L4-CL-L5-Fc; VL1-L1-VL2-L2-VH2-L3-VH1-L4-CH1-L5-CL-L6-Fc; VH1-L1-VH2-L2-VL2-L3-VL1-L4-CH1-L5-CL-L6-Fc; VL1-L1-VL2-L2-VH2-L3-VH1-L4-CL-L5-CH1-L6-Fc; or VH1-L1-VH2-L2-VL2-L3-VL1-L4-CL-L5-CH1-L6-Fc, and the second polypeptide has a structure represented by VH3-VL3-L7-CL-CH1-Fc. In some aspects, the first polypeptide has a structure represented by VL1-VL2-VH2-VH1-CH1-Fc; VH1-VH2-VL2-VL1-CH1-Fc; VL1-VL2-VH2-VH1-CL-Fc; VH1-VH2-VL2-VL1-CL-Fc; VL1-VL2-VH2-VH1-CH1-CL-Fc; VH-VH2-VL2-VL1-CH1-CL-Fc; VL1-VL2-VH2-VH1-CL-CH1-Fc; VH1-VH2-VL2-VL1-CL-CH1-Fc; VL1-L1-VL2-L2-VH2-L3-VH1-L4-CH1-Fc; VH1-L1-VH2-L2-VL2-L3-VL1-L4-CH1-Fc; VL1-L1-VL2-L2-VH2-L3-VH1-L4-CL-Fc; VH1-L1-VH2-L2-VL2-L3-VL1-L4-CL-Fc; VL1-L1-VL2-L2-VH2-L3-VH1-L4-CH1-L5-CL-Fc; VH1-L1-VH2-L2-VL2-L3-VL1-L4-CH1-L5-CL-Fc; VL1-L1-VL2-L2-VH2-L3-VH1-L4-CL-L5-CH1-Fc; VH1-L1-VH2-L2-VL2-L3-VL1-L4-CL-L5-CH1-Fc; VL1-L1-VL2-L2-VH2-L3-VH1-L4-CH1-L5-Fc; VH1-L1-VH2-L2-VL2-L3-VL1-L4-CH1-L5-Fc; VL1-L1-VL2-L2-VH2-L3-VH1-L4-CL-L5-Fc; VH1-L1-VH2-L2-VL2-L3-VL1-L4-CL-L5-Fc; VL1-L1-VL2-L2-VH2-L3-VH1-L4-CH-L5-CL-L6-Fc; VH1-L1-VH2-L2-VL2-L3-VL1-L4-CH1-L5-CL-L6-Fc; VL1-L1-VL2-L2-VH2-L3-VH-L4-CL-L5-CH1-L6-Fc; or VH1-L1-VH2-L2-VL2-L3-VL1-L4-CL-L5-CH1-L6-Fc, and the second polypeptide has a structure represented by VL3-CL-L7-VH3-CH1-Fc. In some aspects, the first polypeptide has a structure represented by VL1-VL2-VH2-VH1-CH1-Fc; VH1-VH2-VL2-VL1-CH1-Fc; VL1-VL2-VH2-VH-CL-Fc; VH1-VH2-VL2-VL1-CL-Fc; VL1-VL2-VH2-VH1-CH1-CL-Fc; VH1-VH2-VL2-VL1-CH1-CL-Fc; VL1-VL2-VH2-VH1-CL-CH1-Fc; VH1-VH2-VL2-VL1-CL-CH1-Fc; VL1-L1-VL2-L2-VH2-L3-VH1-L4-CH1-Fc; VH1-L1-VH2-L2-VL2-L3-VL1-L4-CH1-Fc; VL1-L1-VL2-L2-VH2-L3-VH1-L4-CL-Fc; VH1-L1-VH2-L2-VL2-L3-VL1-L4-CL-Fc; VL1-L1-VL2-L2-VH2-L3-VH1-L4-CH-L5-CL-Fc; VH1-L1-VH2-L2-VL2-L3-VL1-L4-CH1-L5-CL-Fc; VL1-L1-VL2-L2-VH2-L3-VH1-L4-CL-L5-CH1-Fc; VH1-L1-VH2-L2-VL2-L3-VL1-L4-CL-L5-CH1-Fc; VL1-L1-VL2-L2-VH2-L3-VH1-L4-CH1-L5-Fc; VH1-L1-VH2-L2-VL2-L3-VL1-L4-CH-L5-Fc; VL1-L1-VL2-L2-VH2-L3-VH1-L4-CL-L5-Fc; VH1-L1-VH2-L2-VL2-L3-VL1-L4-CL-L5-Fc; VL1-L1-VL2-L2-VH2-L3-VH1-L4-CH1-L5-CL-L6-Fc; VH1-L1-VH2-L2-VL2-L3-VL1-L4-CH-L5-CL-L6-Fc; VL1-L1-VL2-L2-VH2-L3-VH1-L4-CL-L5-CH1-L6-Fc; or VH1-L1-VH2-L2-VL2-L3-VL1-L4-CL-L5-CH1-L6-Fc, and the second polypeptide has a structure represented by VL3-CH1-L7-VH3-CL-Fe. In some aspects, the first polypeptide has a structure represented by VL1-VL2-VH2-VH1-CH1-Fe; VH1-VH2-VL2-VL1-CH1-Fc; VL1-VL2-VH2-VH1-CL-Fc; VH1-VH2-VL2-VL1-CL-Fc; VL1-VL2-VH2-VH1-CH1-CL-Fc; VH-VH2-VL2-VL1-CH1-CL-Fc; VL1-VL2-VH2-VH1-CL-CH1-Fc; VH1-VH2-VL2-VL1-CL-CH1-Fc; VL1-L1-VL2-L2-VH2-L3-VH1-L4-CH1-Fc; VH1-L1-VH2-L2-VL2-L3-VL1-L4-CH1-Fc; VL1-L1-VL2-L2-VH2-L3-VH-L4-CL-Fc; VH1-L1-VH2-L2-VL2-L3-VL1-L4-CL-Fc; VL1-L1-VL2-L2-VH2-L3-VH1-L4-CH1-L5-CL-Fc; VH1-L1-VH2-L2-VL2-L3-VL1-L4-CH-L5-CL-Fc; VL1-L1-VL2-L2-VH2-L3-VH1-L4-CL-L5-CH1-Fc; VH1-L1-VH2-L2-VL2-L3-VL1-L4-CL-L5-CH1-Fc; VL1-L1-VL2-L2-VH2-L3-VH1-L4-CH1-L5-Fc; VH1-L1-VH2-L2-VL2-L3-VL1-L4-CH1-L5-Fc; VL1-L1-VL2-L2-VH2-L3-VH1-L4-CL-L5-Fc; VH1-L1-VH2-L2-VL2-L3-VL1-L4-CL-L5-Fc; VL1-L1-VL2-L2-VH2-L3-VH1-L4-CH1-L5-CL-L6-Fc; VH1-L1-VH2-L2-VL2-L3-VL1-L4-CH1-L5-CL-L6-Fc; VL1-L1-VL2-L2-VH2-L3-VH1-L4-CL-L5-CH1-L6-Fc; or VH1-L1-VH2-L2-VL2-L3-VL1-L4-CL-L5-CH1-L6-Fc, and the second polypeptide has a structure represented by VH3-CH1-L7-VL3-CL-Fc. In some aspects, the first polypeptide has a structure represented by VL1-VL2-VH2-VH1-CH1-Fc; VH1-VH2-VL2-VL1-CH1-Fc; VL1-VL2-VH2-VH1-CL-Fc; VH1-VH2-VL2-VL1-CL-Fc; VL1-VL2-VH2-VH1-CH1-CL-Fc; VH1-VH2-VL2-VL1-CH1-CL-Fc; VL1-VL2-VH2-VH1-CL-CH1-Fc; VH1-VH2-VL2-VL1-CL-CH1-Fc; VL1-L1-VL2-L2-VH2-L3-VH1-L4-CH1-Fc; VH1-L1-VH2-L2-VL2-L3-VL1-L4-CH1-Fc; VL1-L1-VL2-L2-VH2-L3-VH1-L4-CL-Fc; VH1-L1-VH2-L2-VL2-L3-VL1-L4-CL-Fc; VL1-L1-VL2-L2-VH2-L3-VH1-L4-CH1-L5-CL-Fc; VH1-L1-VH2-L2-VL2-L3-VL1-L4-CH1-L5-CL-Fc; VL1-L1-VL2-L2-VH2-L3-VH1-L4-CL-L5-CH1-Fc; VH1-L1-VH2-L2-VL2-L3-VL1-L4-CL-L5-CH1-Fc; VL1-L1-VL2-L2-VH2-L3-VH1-L4-CH1-L5-Fc; VH1-L1-VH2-L2-VL2-L3-VL1-L4-CH1-L5-Fc; VL1-L1-VL2-L2-VH2-L3-VH1-L4-CL-L5-Fc; VH1-L1-VH2-L2-VL2-L3-VL1-L4-CL-L5-Fc; VL1-L1-VL2-L2-VH2-L3-VH1-L4-CH1-L5-CL-L6-Fc; VH1-L1-VH2-L2-VL2-L3-VL1-L4-CH1-L5-CL-L6-Fc; VL1-L1-VL2-L2-VH2-L3-VH1-L4-CL-L5-CH1-L6-Fc; or VH1-L1-VH2-L2-VL2-L3-VL1-L4-CL-L5-CH1-L6-Fc, and the second polypeptide has a structure represented by VH3-CL-L7-VL3-CH1-Fc.

[0219] In other aspects, the invention is directed to an antigen binding polypeptide complex comprising a first polypeptide and a second polypeptide; wherein the first polypeptide has a structure represented by VL1-VL2-VH2-VH1; VH1-VH2-VL2-VL1; VL1-L1-VL2-L2-VH2-L3-VH1; VH1-L1-VH2-L2-VL2-L3-VL1; VL1-VL2-VH2-VH1-Fc; VH1-VH2-VL2-VL1-Fc; VL1-L1-VL2-L2-VH2-L3-VH1-Fc; VH1-L1-VH2-L2-VL2-L3-VL1-Fc; VL1-L1-VL2-L2-VH2-L3-VH1-L4-Fc; VH1-L1-VH2-L2-VL2-L3-VL1-L4-Fc; VL1-VL2-VH2-VH1-CH1; VH1-VH2-VL2-VL1-CH1; VL1-VL2-VH2-VH1-CL; VH1-VH2-VL2-VL1-CL; VL1-VL2-VH2-VH1-CH1-CL; VH1-VH2-VL2-VL1-CH1-CL; VL1-VL2-VH2-VH1-CL-CH1; VH1-VH2-VL2-VL1-CL-CH1; VL1-L1-VL2-L2-VH2-L3-VH1-L4-CH1; VH1-L1-VH2-L2-VL2-L3-VL1-L4-CH1; VL1-L1-VL2-L2-VH2-L3-VH1-L4-CL; VH1-L1-VH2-L2-VL2-L3-VL1-L4-CL; VL1-L1-VL2-L2-VH2-L3-VH1-L4-CH1-L5-CL; VH1-L1-VH2-L2-VL2-L3-VL1-L4-CH1-L5-CL; VL1-L1-VL2-L2-VH2-L3-VH1-L4-CL-L5-CH1; VH1-L1-VH2-L2-VL2-L3-VL1-L4-CL-L5-CH1; VL1-VL2-VH2-VH1-CH1-Fc; VH1-VH2-VL2-VL1-CH1-Fc; VL1-VL2-VH2-VH1-CL-Fc; VH1-VH2-VL2-VL1-CL-Fc; VL1-VL2-VH2-VH11-CH1-CL-Fc; VH1-VH2-VL2-VL1-CH1-CL-Fc; VL1-VL2-VH2-VH1-CL-CH1-Fc; VH1-VH2-VL2-VL1-CL-CH1-Fc; VL1-L1-VL2-L2-VH2-L3-VH1-L4-CH1-Fc; VH1-L1-VH2-L2-VL2-L3-VL1-L4-CH1-Fc; VL1-L1-VL2-L2-VH2-L3-VH1-L4-CL-Fc; VH1-L1-VH2-L2-VL2-L3-VL1-L4-CL-Fc; VL1-L1-VL2-L2-VH2-L3-VH1-L4-CH1-L5-CL-Fc; VH1-L1-VH2-L2-VL2-L3-VL1-L4-CH1-L5-CL-Fc; VL1-L1-VL2-L2-VH2-L3-VH1-L4-CL-L5-CH1-Fc; VH1-L1-VH2-L2-VL2-L3-VL1-L4-CL-L5-CH1-Fc; VL1-L1-VL2-L2-VH2-L3-VH1-L4-CH1-L5-Fc; VH1-L1-VH2-L2-VL2-L3-VL1-L4-CH1-L5-Fc; VL1-L1-VL2-L2-VH2-L3-VH1-L4-CL-L5-Fc; VH1-L1-VH2-L2-VL2-L3-VL1-L4-CL-L5-Fc; VL1-L1-VL2-L2-VH2-L3-VH1-L4-CH1-L5-CL-L6-Fc; VH1-L1-VH2-L2-VL2-L3-VL1-L4-CH1-L5-CL-L6-Fc; VL1-L1-VL2-L2-VH2-L3-VH1-L4-CL-L5-CH1-L6-Fc; or VH1-L1-VH2-L2-VL2-L3-VL1-L4-CL-L5-CH1-L6-Fc; wherein the second polypeptide has a structure represented by VL3-VH3; VH3-VL3; VL3-L4-VH3; VH3-L4-VL3; VL3-VH3-Fc; VH3-VL3-Fc; VL3-L4-VH3-Fc; VH3-L4-VL3-Fc; VL3-VH3-CH1; VH3-VL3-CH1; VL3-VH3-CL; VH3-VL3-CL; VL3-VH3-CH1-CL; VH3-VL3-CH1-CL; VL3-VH3-CL-CH1; VH3-VL3-CL-CH1; VL3-CL-VH3-CH1; VL3-CH1-VH3-CL; VH3-CH1-VL3-CL; VH3-CL-VL3-CH1; VL3-L7-VH3-L8-CH1; VH3-L7-VL3-L8-CH1; VL3-L7-VH3-L8-CL; VH3-L7-VL3-L8-CL; VL3-L7-VH3-L8-CH1-L9-CL; VH3-L7-VL3-L8-CH1-L9-CL; VL3-L7-VH3-L8-CL-L9-CH1; VH3-L7-VL3-L8-CL-L9-CH1; VL3-L7-CL-L8-VH3-L9-CH1; VL3-L7-CH1-L8-VH3-L9-CL; VH3-L7-CH1-L8-VL3-L9-CL; VH3-L7-CL-L8-VL3-L9-CH1; VL3-VH3-L7-CH1-CL; VH3-VL3-L7-CH1-CL; VL3-VH3-L7-CL-CH1; VH3-VL3-L7-CL-CH1; VL3-CL-L7-VH3-CH1; VL3-CH1-L7-VH3-CL; VH3-CH1-L7-VL3-CL; VH3-CL-L7-VL3-CH1; VL3-VH3-CH1-Fc; VH3-VL3-CH1-Fc; VL3-VH3-CL-Fc; VH3-VL3-CL-Fc; VL3-VH3-CH1-CL-Fc; VH3-VL3-CH1-CL-Fc; VL3-VH3-CL-CH1-Fc; VH3-VL3-CL-CH1-Fc; VL3-CL-VH3-CH1-Fc; VL3-CH1-VH3-CL-Fc; VH3-CH1-VL3-CL-Fc; VH3-CL-VL3-CH1-Fc; VL3-L7-VH3-L8-CH1-Fc; VH3-L7-VL3-L8-CH1-Fc; VL3-L7-VH3-L8-CL-Fc; VH3-L7-VL3-L8-CL-Fe; VL3-L7-VH3-L8-CH1-L9-CL-Fc; VH3-L7-VL3-L8-CH1-L9-CL-Fc; VL3-L7-VH3-L8-CL-L9-CH1-Fc; VH3-L7-VL3-L8-CL-L9-CH1-Fc; VL3-L7-CL-L8-VH3-L9-CH1-Fc; VL3-L7-CH1-L8-VH3-L9-CL-Fc; VH3-L7-CH1-L8-VL3-L9-CL-Fc; VH3-L7-CL-L8-VL3-L9-CH1-Fc; VL3-L7-VH3-L8-CH1-L9-Fc; VH3-L7-VL3-L8-CH1-L9-Fc; VL3-L7-VH3-L8-CL-L9-Fc; VH3-L7-VL3-L8-CL-L9-Fc; VL3-L7-VH3-L8-CH1-L9-CL-L10-Fc; VH3-L7-VL3-L8-CH1-L9-CL-L10-Fc; VL3-L7-VH3-L8-CL-L9-CH1-L10-Fc; VH3-L7-VL3-L8-CL-L9-CH1-L10-Fc; VL3-L7-CL-L8-VH3-L9-CH1-L10-Fc; VL3-L7-CH1-L8-VH3-L9-CL-L10-Fc; VH3-L7-CH1-L8-VL3-L9-CL-L10-Fc; VH3-L7-CL-L8-VL3-L9-CH1-L10-Fc; VL3-VH3-L7-CH1-CL-Fc; VH3-VL3-L7-CH1-CL-Fc; VL3-VH3-L7-CL-CH1-Fc; VH3-VL3-L7-CL-CH1-Fc; VL3-CL-L7-VH3-CH1-Fc; VL3-CH1-L7-VH3-CL-Fc; VH3-CH1-L7-VL3-CL-Fc; or VH3-CL-L7-VL3-CH1-Fe; wherein VL1 is a first immunoglobulin light chain variable region that specifically binds to an HIV protein; VL2 is a second immunoglobulin light chain variable region that specifically binds to an HIV protein; VL3 is a third immunoglobulin light chain variable region that specifically binds to an HIV protein; VH1 is a first immunoglobulin heavy chain variable region that specifically binds to an HIV protein; VH2 is a second immunoglobulin heavy chain variable region that specifically binds to an HIV protein; VH3 is a third immunoglobulin heavy chain variable region that specifically binds to an HIV protein; Fc is a region comprising an immunoglobulin heavy chain constant region 2 (CH2), an immunoglobulin heavy chain constant region 3 (CH3), and optionally, an immunoglobulin hinge; CH1 is an immunoglobulin heavy chain constant region 1; CL is an immunoglobulin light chain constant region; and L1, L2, L3, L4, L5, L6, L7, L8, L9 and L10 are amino acid linkers. In some aspects, the first polypeptide has a structure represented by VL1-VL2-VH2-VH1 and the second polypeptide has a structure represented by VL3-VH3, VL3-L7-VH3, VL3-L4-VH3, VL3-CL-VH3, VL3-CH1-VH3, VL3-L7-CL-L8-VH3, VL3-L7-CH1-L8-VH3, VL3-CL-L7-VH3, VL3-CH1-L7-VH3, VH3-VL3, VH3-L7-VL3, VH3-L4-VL3, VH3-CH1-VL3, VH3-CL-VL3, VH3-L7-CH1-L8-VL3, VH3-L7-CL-L8-VL3, VH3-CH1-L7-VL3, or VH3-CL-L7-VL3; optionally wherein the first and/or second polypeptide comprises at least one of an Fc region, a CL region, and a CH1 region at the carboxy terminus of the first, second and/or third polypeptide, or wherein the first, second and/or third polypeptide comprises a CH1-CL, CL-CH1, CH1-Fc, CL-Fc, CL-CH1-Fc, CH1-CL-Fc at the carboxy terminus of the first, second and/or third polypeptide. In some aspects, the first polypeptide has a structure represented by VL1-VL2-VH2-VH1 and the second polypeptide has a structure represented by VL3-VH3, VL3-L7-VH3, VL3-L4-VH3, VL3-CL-VH3, VL3-CH1-VH3, VL3-L7-CL-L8-VH3, VL3-L7-CH1-L8-VH3, VL3-CL-L7-VH3, VL3-CH1-L7-VH3, VH3-VL3, VH3-L7-VL3, VH3-L4-VL3, VH3-CH1-VL3, VH3-CL-VL3, VH3-L7-CH1-L8-VL3, VH3-L7-CL-L8-VL3, VH3-CH1-L7-VL3, or VH3-CL-L7-VL3; optionally wherein the first and/or second polypeptide comprises at least one of an Fe region, a CL region, and a CH1 region at the carboxy terminus of the first, second and/or third polypeptide, or wherein the first, second and/or third polypeptide comprises a CH1-CL, CL-CH1, CH1-Fc, CL-Fc, CL-CH1-Fc, CH1-CL-Fc at the carboxy terminus of the first, second and/or third polypeptide, wherein the CH1-CL, CL-CH1, CH1-Fc, CL-Fc, CL-CH1-Fc, or CH1-CL-Fc region is linked to the carboxy terminus of the second polypeptide via one or more amino acid linker, and wherein the CH1, CL and Fc when present in the second polypeptide are linked to each other via one or more amino acid linker. In some aspects, the first polypeptide has a structure represented by VL1-L1-VL2-L2-VH2-L3-VH1 and the second polypeptide has a structure represented by VL3-VH3, VL3-L7-VH3, VL3-L4-VH3, VL3-CL-VH3, VL3-CH1-VH3, VL3-L7-CL-L8-VH3, VL3-L7-CH1-L8-VH3, VL3-CL-L7-VH3, VL3-CH1-L7-VH3, VH3-VL3, VH3-L7-VL3, VH3-L4-VL3, VH3-CH1-VL3, VH3-CL-VL3, VH3-L7-CH1-L8-VL3, VH3-L7-CL-L8-VL3, VH3-CH1-L7-VL3, or VH3-CL-L7-VL3; optionally wherein the second polypeptide comprises at least one of an Fc region, a CL region, and a CH1 region at the carboxy terminus of the second polypeptide, or wherein second polypeptide comprises a CH1-CL, CL-CH1, CH1-Fc, CL-Fc, CL-CH1-Fc, CH1-CL-Fc at the carboxy terminus of the second polypeptide, wherein the CH1-CL, CL-CH1, CH1-Fc, CL-Fc, CL-CH1-Fc, or CH1-CL-Fc region is linked to the carboxy terminus of the second polypeptide via one or more amino acid linker, and wherein the CH1, CL and Fc when present in the second polypeptide are linked to each other via one or more amino acid linker. In some aspects, the first polypeptide has a structure represented by VL1-L1-VL2-L2-VH2-L3-VH1-L4-Fc and the second polypeptide has a structure represented by VL3-VH3, VL3-L7-VH3, VL3-L4-VH3, VL3-CL-VH3, VL3-CH1-VH3, VL3-L7-CL-L8-VH3, VL3-L7-CH1-L8-VH3, VL3-CL-L7-VH3, VL3-CH1-L7-VH3, VH3-VL3, VH3-L7-VL3, VH3-L4-VL3, VH3-CH1-VL3, VH3-CL-VL3, VH3-L7-CH1-L8-VL3, VH3-L7-CL-L8-VL3, VH3-CH1-L7-VL3, or VH3-CL-L7-VL3; optionally wherein the second polypeptide comprises at least one of an Fc region, a CL region, and a CH1 region at the carboxy terminus of the second polypeptide, or wherein second polypeptide comprises a CH1-CL, CL-CH1, CH1-Fc, CL-Fc, CL-CH1-Fc, CH1-CL-Fc at the carboxy terminus of the second polypeptide, wherein the CH1-CL, CL-CH1, CH1-Fc, CL-Fc, CL-CH1-Fc, or CH1-CL-Fc region is linked to the carboxy terminus of the second polypeptide via one or more amino acid linker, and wherein the CH1, CL and Fc when present in the second polypeptide are linked to each other via one or more amino acid linker. In some aspects, the first polypeptide has a structure represented by VL1-L1-VL2-L2-VH2-L3-VH1-L4-CH1 and the second polypeptide has a structure represented by VL3-VH3, VL3-L7-VH3, VL3-L4-VH3, VL3-CL-VH3, VL3-CH1-VH3, VL3-L7-CL-L8-VH3, VL3-L7-CH1-L8-VH3, VL3-CL-L7-VH3, VL3-CH1-L7-VH3, VH3-VL3, VH3-L7-VL3, VH3-L4-VL3, VH3-CH1-VL3, VH3-CL-VL3, VH3-L7-CH1-L8-VL3, VH3-L7-CL-L8-VL3, VH3-CH1-L7-VL3, or VH3-CL-L7-VL3; optionally wherein the second polypeptide comprises at least one of an Fc region, a CL region, and a CH1 region at the carboxy terminus of the second polypeptide, or wherein second polypeptide comprises a CH1-CL, CL-CH1, CH1-Fc, CL-Fc, CL-CH1-Fc, CH1-CL-Fc at the carboxy terminus of the second polypeptide, wherein the CH1-CL, CL-CH1, CH1-Fc, CL-Fc, CL-CH1-Fc, or CH1-CL-Fc region is linked to the carboxy terminus of the second polypeptide via one or more amino acid linker, and wherein the CH1, CL and Fc when present in the second polypeptide are linked to each other via one or more amino acid linker. In some aspects, the first polypeptide has a structure represented by VL1-L1-VL2-L2-VH2-L3-VH1-L4-CL and the second polypeptide has a structure represented by VL3-VH3, VL3-L7-VH3, VL3-L4-VH3, VL3-CL-VH3, VL3-CH1-VH3, VL3-L7-CL-L8-VH3, VL3-L7-CH1-L8-VH3, VL3-CL-L7-VH3, VL3-CH1-L7-VH3, VH3-VL3, VH3-L7-VL3, VH3-L4-VL3, VH3-CH1-VL3, VH3-CL-VL3, VH3-L7-CH1-L8-VL3, VH3-L7-CL-L8-VL3, VH3-CH1-L7-VL3, or VH3-CL-L7-VL3; optionally wherein the second polypeptide comprises at least one of an Fc region, a CL region, and a CH1 region at the carboxy terminus of the second polypeptide, or wherein second polypeptide comprises a CH1-CL, CL-CH1, CH1-Fc, CL-Fc, CL-CH1-Fc, CH1-CL-Fc at the carboxy terminus of the second polypeptide, wherein the CH1-CL, CL-CH1, CH1-Fc, CL-Fc, CL-CH1-Fc, or CH1-CL-Fc region is linked to the carboxy terminus of the second polypeptide via one or more amino acid linker, and wherein the CH1, CL and Fc when present in the second polypeptide are linked to each other via one or more amino acid linker. In some aspects, the first polypeptide has a structure represented by VL1-L1-VL2-L2-VH2-L3-VH1-L4-CL-Fc and the second polypeptide has a structure represented by VL3-VH3, VL3-L7-VH3, VL3-L4-VH3, VL3-CL-VH3, VL3-CH1-VH3, VL3-L7-CL-L8-VH3, VL3-L7-CH1-L8-VH3, VL3-CL-L7-VH3, VL3-CH1-L7-VH3, VH3-VL3, VH3-L7-VL3, VH3-L4-VL3, VH3-CH1-VL3, VH3-CL-VL3, VH3-L7-CH1-L8-VL3, VH3-L7-CL-L8-VL3, VH3-CH1-L7-VL3, or VH3-CL-L7-VL3; optionally wherein the second polypeptide comprises at least one of an Fc region, a CL region, and a CH1 region at the carboxy terminus of the second polypeptide, or wherein second polypeptide comprises a CH1-CL, CL-CH1, CH1-Fc, CL-Fc, CL-CH1-Fc, CH1-CL-Fc at the carboxy terminus of the second polypeptide, wherein the CH1-CL, CL-CH1, CH1-Fc, CL-Fc, CL-CH1-Fc, or CH1-CL-Fc region is linked to the carboxy terminus of the second polypeptide via one or more amino acid linker, and wherein the CH1, CL and Fc when present in the second polypeptide are linked to each other via one or more amino acid linker. In some aspects, the first polypeptide has a structure represented by VL1-L1-VL2-L2-VH2-L3-VH1-L4-CH1-Fc and the second polypeptide has a structure represented by VL3-VH3, VL3-L7-VH3, VL3-L4-VH3, VL3-CL-VH3, VL3-CH1-VH3, VL3-L7-CL-L8-VH3, VL3-L7-CH1-L8-VH3, VL3-CL-L7-VH3, VL3-CH1-L7-VH3, VH3-VL3, VH3-L7-VL3, VH3-L4-VL3, VH3-CH1-VL3, VH3-CL-VL3, VH3-L7-CH1-L8-VL3, VH3-L7-CL-L8-VL3, VH3-CH1-L7-VL3, or VH3-CL-L7-VL3; optionally wherein the second polypeptide comprises at least one of an Fc region, a CL region, and a CH1 region at the carboxy terminus of the second polypeptide, or wherein second polypeptide comprises a CH1-CL, CL-CH1, CH1-Fc, CL-Fc, CL-CH1-Fc, CH1-CL-Fc at the carboxy terminus of the second polypeptide, wherein the CH1-CL, CL-CH1, CH1-Fc, CL-Fc, CL-CH1-Fc, or CH1-CL-Fc region is linked to the carboxy terminus of the second polypeptide via one or more amino acid linker, and wherein the CH1, CL and Fc when present in the second polypeptide are linked to each other via one or more amino acid linker. In some aspects, the first polypeptide has a structure represented by VL1-L1-VL2-L2-VH2-L3-VH1-L4-CH1-L5-CL and the second polypeptide has a structure represented by VL3-VH3, VL3-L7-VH3, VL3-L4-VH3, VL3-CL-VH3, VL3-CH1-VH3, VL3-L7-CL-L8-VH3, VL3-L7-CH1-L8-VH3, VL3-CL-L7-VH3, VL3-CH1-L7-VH3, VH3-VL3, VH3-L7-VL3, VH3-L4-VL3, VH3-CH1-VL3, VH3-CL-VL3, VH3-L7-CH1-L8-VL3, VH3-L7-CL-L8-VL3, VH3-CH1-L7-VL3, or VH3-CL-L7-VL3; optionally wherein the second polypeptide comprises at least one of an Fc region, a CL region, and a CH1 region at the carboxy terminus of the second polypeptide, or wherein second polypeptide comprises a CH1-CL, CL-CH1, CH1-Fc, CL-Fc, CL-CH1-Fc, CH1-CL-Fc at the carboxy terminus of the second polypeptide, wherein the CH1-CL, CL-CH1, CH1-Fc, CL-Fc, CL-CH1-Fc, or CH1-CL-Fc region is linked to the carboxy terminus of the second polypeptide via one or more amino acid linker, and wherein the CH1, CL and Fc when present in the second polypeptide are linked to each other via one or more amino acid linker. In some aspects, the first polypeptide has a structure represented by VL1-L1-VL2-L2-VH2-L3-VH1-L4-CL-L5-CH1 and the second polypeptide has a structure represented by VL3-VH3, VL3-L7-VH3, VL3-L4-VH3, VL3-CL-VH3, VL3-CH1-VH3, VL3-L7-CL-L8-VH3, VL3-L7-CH1-L8-VH3, VL3-CL-L7-VH3, VL3-CH1-L7-VH3, VH3-VL3, VH3-L7-VL3, VH3-L4-VL3, VH3-CH1-VL3, VH3-CL-VL3, VH3-L7-CH1-L8-VL3, VH3-L7-CL-L8-VL3, VH3-CH1-L7-VL3, or VH3-CL-L7-VL3; optionally wherein the second polypeptide comprises at least one of an Fc region, a CL region, and a CH1 region at the carboxy terminus of the second polypeptide, or wherein second polypeptide comprises a CH1-CL, CL-CH1, CH1-Fc, CL-Fc, CL-CH1-Fc, CH1-CL-Fc at the carboxy terminus of the second polypeptide, wherein the CH1-CL, CL-CH1, CH1-Fc, CL-Fc, CL-CH1-Fc, or CH1-CL-Fc region is linked to the carboxy terminus of the second polypeptide via one or more amino acid linker, and wherein the CH1, CL and Fc when present in the second polypeptide are linked to each other via one or more amino acid linker. In some aspects, the first polypeptide has a structure represented by VL1-L1-VL2-L2-VH2-L3-VH1-L4-CL-L5-Fc and the second polypeptide has a structure represented by VL3-VH3, VL3-L7-VH3, VL3-L4-VH3, VL3-CL-VH3, VL3-CH1-VH3, VL3-L7-CL-L8-VH3, VL3-L7-CH1-L8-VH3, VL3-CL-L7-VH3, VL3-CH1-L7-VH3, VH3-VL3, VH3-L7-VL3, VH3-L4-VL3, VH3-CH1-VL3, VH3-CL-VL3, VH3-L7-CH1-L8-VL3, VH3-L7-CL-L8-VL3, VH3-CH1-L7-VL3, or VH3-CL-L7-VL3; optionally wherein the second polypeptide comprises at least one of an Fc region, a CL region, and a CH1 region at the carboxy terminus of the second polypeptide, or wherein second polypeptide comprises a CH1-CL, CL-CH1, CH1-Fc, CL-Fc, CL-CH1-Fc, CH1-CL-Fc at the carboxy terminus of the second polypeptide, wherein the CH1-CL, CL-CH1, CH1-Fc, CL-Fc, CL-CH1-Fc, or CH1-CL-Fc region is linked to the carboxy terminus of the second polypeptide via one or more amino acid linker, and wherein the CH1, CL and Fc when present in the second polypeptide are linked to each other via one or more amino acid linker. In some aspects, the first polypeptide has a structure represented by VL1-L1-VL2-L2-VH2-L3-VH1-L4-CH1-L5-Fc and the second polypeptide has a structure represented by VL3-VH3, VL3-L7-VH3, VL3-L4-VH3, VL3-CL-VH3, VL3-CH1-VH3, VL3-L7-CL-L8-VH3, VL3-L7-CH1-L8-VH3, VL3-CL-L7-VH3, VL3-CH1-L7-VH3, VH3-VL3, VH3-L7-VL3, VH3-L4-VL3, VH3-CH1-VL3, VH3-CL-VL3, VH3-L7-CH1-L8-VL3, VH3-L7-CL-L8-VL3, VH3-CH1-L7-VL3, or VH3-CL-L7-VL3; optionally wherein the second polypeptide comprises at least one of an Fc region, a CL region, and a CH1 region at the carboxy terminus of the second polypeptide, or wherein second polypeptide comprises a CH1-CL, CL-CH1, CH1-Fc, CL-Fc, CL-CH1-Fc, CH1-CL-Fc at the carboxy terminus of the second polypeptide, wherein the CH1-CL, CL-CH1, CH1-Fc, CL-Fc, CL-CH1-Fc, or CH1-CL-Fc region is linked to the carboxy terminus of the second polypeptide via one or more amino acid linker, and wherein the CH1, CL and Fc when present in the second polypeptide are linked to each other via one or more amino acid linker. In some aspects, the first polypeptide has a structure represented by VL1-L1-VL2-L2-VH2-L3-VH1-L4-CH1-L5-CL-Fc and the second polypeptide has a structure represented by VL3-VH3, VL3-L7-VH3, VL3-L4-VH3, VL3-CL-VH3, VL3-CH1-VH3, VL3-L7-CL-L8-VH3, VL3-L7-CH1-L8-VH3, VL3-CL-L7-VH3, VL3-CH1-L7-VH3, VH3-VL3, VH3-L7-VL3, VH3-L4-VL3, VH3-CH1-VL3, VH3-CL-VL3, VH3-L7-CH1-L8-VL3, VH3-L7-CL-L8-VL3, VH3-CH1-L7-VL3, or VH3-CL-L7-VL3; optionally wherein the second polypeptide comprises at least one of an Fc region, a CL region, and a CH1 region at the carboxy terminus of the second polypeptide, or wherein second polypeptide comprises a CH1-CL, CL-CH1, CH1-Fc, CL-Fc, CL-CH1-Fc, CH1-CL-Fc at the carboxy terminus of the second polypeptide, wherein the CH1-CL, CL-CH1, CH1-Fc, CL-Fc, CL-CH1-Fc, or CH1-CL-Fc region is linked to the carboxy terminus of the second polypeptide via one or more amino acid linker, and wherein the CH1, CL and Fc when present in the second polypeptide are linked to each other via one or more amino acid linker. In some aspects, the first polypeptide has a structure represented by VL1-L1-VL2-L2-VH2-L3-VH1-L4-CL-L5-CH1-Fc and the second polypeptide has a structure represented by VL3-VH3, VL3-L7-VH3, VL3-L4-VH3, VL3-CL-VH3, VL3-CH1-VH3, VL3-L7-CL-L8-VH3, VL3-L7-CH1-L8-VH3, VL3-CL-L7-VH3, VL3-CH1-L7-VH3, VH3-VL3, VH3-L7-VL3, VH3-L4-VL3, VH3-CH1-VL3, VH3-CL-VL3, VH3-L7-CH1-L8-VL3, VH3-L7-CL-L8-VL3, VH3-CH1-L7-VL3, or VH3-CL-L7-VL3; optionally wherein the second polypeptide comprises at least one of an Fc region, a CL region, and a CH1 region at the carboxy terminus of the second polypeptide, or wherein second polypeptide comprises a CH1-CL, CL-CH1, CH1-Fc, CL-Fc, CL-CH1-Fc, CH1-CL-Fc at the carboxy terminus of the second polypeptide, wherein the CH1-CL, CL-CH1, CH1-Fc, CL-Fc, CL-CH1-Fc, or CH1-CL-Fc region is linked to the carboxy terminus of the second polypeptide via one or more amino acid linker, and wherein the CH1, CL and Fc when present in the second polypeptide are linked to each other via one or more amino acid linker. In some aspects, the first polypeptide has a structure represented by VL1-L1-VL2-L2-VH2-L3-VH1-L4-CH1-L5-CL-L6-Fc and the second polypeptide has a structure represented by VL3-VH3, VL3-L7-VH3, VL3-L4-VH3, VL3-CL-VH3, VL3-CH1-VH3, VL3-L7-CL-L8-VH3, VL3-L7-CH1-L8-VH3, VL3-CL-L7-VH3, VL3-CH1-L7-VH3, VH3-VL3, VH3-L7-VL3, VH3-L4-VL3, VH3-CH1-VL3, VH3-CL-VL3, VH3-L7-CH1-L8-VL3, VH3-L7-CL-L8-VL3, VH3-CH1-L7-VL3, or VH3-CL-L7-VL3; optionally wherein the second polypeptide comprises at least one of an Fc region, a CL region, and a CH1 region at the carboxy terminus of the second polypeptide, or wherein second polypeptide comprises a CH1-CL, CL-CH1, CH1-Fc, CL-Fc, CL-CH1-Fc, CH1-CL-Fc at the carboxy terminus of the second polypeptide, wherein the CH1-CL, CL-CH1, CH1-Fc, CL-Fc, CL-CH1-Fc, or CH1-CL-Fc region is linked to the carboxy terminus of the second polypeptide via one or more amino acid linker, and wherein the CH1, CL and Fc when present in the second polypeptide are linked to each other via one or more amino acid linker. In some aspects, the first polypeptide has a structure represented by VL1-L1-VL2-L2-VH2-L3-VH1-L4-CL-L5-CH1-L6-Fc and the second polypeptide has a structure represented by VL3-VH3, VL3-L7-VH3, VL3-L4-VH3, VL3-CL-VH3, VL3-CH1-VH3, VL3-L7-CL-L8-VH3, VL3-L7-CH1-L8-VH3, VL3-CL-L7-VH3, VL3-CH1-L7-VH3, VH3-VL3, VH3-L7-VL3, VH3-L4-VL3, VH3-CH1-VL3, VH3-CL-VL3, VH3-L7-CH1-L8-VL3, VH3-L7-CL-L8-VL3, VH3-CH1-L7-VL3, or VH3-CL-L7-VL3; optionally wherein the second polypeptide comprises at least one of an Fc region, a CL region, and a CH1 region at the carboxy terminus of the second polypeptide, or wherein second polypeptide comprises a CH1-CL, CL-CH1, CH1-Fc, CL-Fc, CL-CH1-Fc, CH1-CL-Fc at the carboxy terminus of the second polypeptide, wherein the CH1-CL, CL-CH1, CH1-Fc, CL-Fc, CL-CH1-Fc, or CH1-CL-Fc region is linked to the carboxy terminus of the second polypeptide via one or more amino acid linker, and wherein the CH1, CL and Fc when present in the second polypeptide are linked to each other via one or more amino acid linker. In some aspects, the first polypeptide has a structure represented by VH1-VH2-VL2-VL1 and the second polypeptide has a structure represented by VL3-VH3, VL3-L7-VH3, VL3-L4-VH3, VL3-CL-VH3, VL3-CH1-VH3, VL3-L7-CL-L8-VH3, VL3-L7-CH1-L8-VH3, VL3-CL-L7-VH3, VL3-CH1-L7-VH3, VH3-VL3, VH3-L7-VL3, VH3-L4-VL3, VH3-CH1-VL3, VH3-CL-VL3, VH3-L7-CH1-L8-VL3, VH3-L7-CL-L8-VL3, VH3-CH1-L7-VL3, or VH3-CL-L7-VL3; optionally wherein the first and/or second polypeptide comprises at least one of an Fc region, a CL region, and a CH1 region at the carboxy terminus of the first, second and/or third polypeptide, or wherein the first, second and/or third polypeptide comprises a CH1-CL, CL-CH1, CH1-Fc, CL-Fc, CL-CH1-Fc, CH1-CL-Fc at the carboxy terminus of the first, second and/or third polypeptide. In some aspects, the first polypeptide has a structure represented by VH1-VH2-VL2-VL1 and the second polypeptide has a structure represented by VL3-VH3, VL3-L7-VH3, VL3-L4-VH3, VL3-CL-VH3, VL3-CH1-VH3, VL3-L7-CL-L8-VH3, VL3-L7-CH1-L8-VH3, VL3-CL-L7-VH3, VL3-CH1-L7-VH3, VH3-VL3, VH3-L7-VL3, VH3-L4-VL3, VH3-CH1-VL3, VH3-CL-VL3, VH3-L7-CH1-L8-VL3, VH3-L7-CL-L8-VL3, VH3-CH1-L7-VL3, or VH3-CL-L7-VL3; optionally wherein the first and/or second polypeptide comprises at least one of an Fc region, a CL region, and a CH1 region at the carboxy terminus of the first, second and/or third polypeptide, or wherein the first, second and/or third polypeptide comprises a CH1-CL, CL-CH1, CH1-Fc, CL-Fc, CL-CH1-Fc, CH1-CL-Fc at the carboxy terminus of the first, second and/or third polypeptide, wherein the CH1-CL, CL-CH1, CH1-Fc, CL-Fc, CL-CH1-Fc, or CH1-CL-Fc region is linked to the carboxy terminus of the second polypeptide via one or more amino acid linker, and wherein the CH1, CL and Fc when present in the second polypeptide are linked to each other via one or more amino acid linker. In some aspects, the first polypeptide has a structure represented by VH1-L1-VH2-L2-VL2-L3-VL1 and the second polypeptide has a structure represented by VL3-VH3, VL3-L7-VH3, VL3-L4-VH3, VL3-CL-VH3, VL3-CH1-VH3, VL3-L7-CL-L8-VH3, VL3-L7-CH1-L8-VH3, VL3-CL-L7-VH3, VL3-CH1-L7-VH3, VH3-VL3, VH3-L7-VL3, VH3-L4-VL3, VH3-CH1-VL3, VH3-CL-VL3, VH3-L7-CH1-L8-VL3, VH3-L7-CL-L8-VL3, VH3-CH1-L7-VL3, or VH3-CL-L7-VL3; optionally wherein the second polypeptide comprises at least one of an Fc region, a CL region, and a CH1 region at the carboxy terminus of the second polypeptide, or wherein second polypeptide comprises a CH1-CL, CL-CH1, CH1-Fc, CL-Fc, CL-CH1-Fc, CH1-CL-Fc at the carboxy terminus of the second polypeptide, wherein the CH1-CL, CL-CH1, CH1-Fc, CL-Fc, CL-CH1-Fc, or CH1-CL-Fc region is linked to the carboxy terminus of the second polypeptide via one or more amino acid linker, and wherein the CH1, CL and Fc when present in the second polypeptide are linked to each other via one or more amino acid linker. In some aspects, the first polypeptide has a structure represented by VH1-L1-VH2-L2-VL2-L3-VL1-L4-Fc and the second polypeptide has a structure represented by VL3-VH3, VL3-L7-VH3, VL3-L4-VH3, VL3-CL-VH3, VL3-CH1-VH3, VL3-L7-CL-L8-VH3, VL3-L7-CH1-L8-VH3, VL3-CL-L7-VH3, VL3-CH1-L7-VH3, VH3-VL3, VH3-L7-VL3, VH3-L4-VL3, VH3-CH1-VL3, VH3-CL-VL3, VH3-L7-CH1-L8-VL3, VH3-L7-CL-L8-VL3, VH3-CH1-L7-VL3, or VH3-CL-L7-VL3; optionally wherein the second polypeptide comprises at least one of an Fc region, a CL region, and a CH1 region at the carboxy terminus of the second polypeptide, or wherein second polypeptide comprises a CH1-CL, CL-CH1, CH1-Fc, CL-Fc, CL-CH1-Fc, CH1-CL-Fc at the carboxy terminus of the second polypeptide, wherein the CH1-CL, CL-CH1, CH1-Fc, CL-Fc, CL-CH1-Fc, or CH1-CL-Fc region is linked to the carboxy terminus of the second polypeptide via one or more amino acid linker, and wherein the CH1, CL and Fc when present in the second polypeptide are linked to each other via one or more amino acid linker. In some aspects, the first polypeptide has a structure represented by VH1-L1-VH2-L2-VL2-L3-VL1-L4-CH1 and the second polypeptide has a structure represented by VL3-VH3, VL3-L7-VH3, VL3-L4-VH3, VL3-CL-VH3, VL3-CH1-VH3, VL3-L7-CL-L8-VH3, VL3-L7-CH1-L8-VH3, VL3-CL-L7-VH3, VL3-CH1-L7-VH3, VH3-VL3, VH3-L7-VL3, VH3-L4-VL3, VH3-CH1-VL3, VH3-CL-VL3, VH3-L7-CH1-L8-VL3, VH3-L7-CL-L8-VL3, VH3-CH1-L7-VL3, or VH3-CL-L7-VL3; optionally wherein the second polypeptide comprises at least one of an Fc region, a CL region, and a CH1 region at the carboxy terminus of the second polypeptide, or wherein second polypeptide comprises a CH1-CL, CL-CH1, CH1-Fc, CL-Fc, CL-CH1-Fc, CH1-CL-Fc at the carboxy terminus of the second polypeptide, wherein the CH1-CL, CL-CH1, CH1-Fc, CL-Fc, CL-CH1-Fc, or CH1-CL-Fc region is linked to the carboxy terminus of the second polypeptide via one or more amino acid linker, and wherein the CH1, CL and Fc when present in the second polypeptide are linked to each other via one or more amino acid linker. In some aspects, the first polypeptide has a structure represented by VH1-L1-VH2-L2-VL2-L3-VL1-L4-CL and the second polypeptide has a structure represented by VL3-VH3, VL3-L7-VH3, VL3-L4-VH3, VL3-CL-VH3, VL3-CH1-VH3, VL3-L7-CL-L8-VH3, VL3-L7-CH1-L8-VH3, VL3-CL-L7-VH3, VL3-CH1-L7-VH3, VH3-VL3, VH3-L7-VL3, VH3-L4-VL3, VH3-CH1-VL3, VH3-CL-VL3, VH3-L7-CH1-L8-VL3, VH3-L7-CL-L8-VL3, VH3-CH1-L7-VL3, or VH3-CL-L7-VL3; optionally wherein the second polypeptide comprises at least one of an Fc region, a CL region, and a CH1 region at the carboxy terminus of the second polypeptide, or wherein second polypeptide comprises a CH1-CL, CL-CH1, CH1-Fc, CL-Fc, CL-CH1-Fc, CH1-CL-Fc at the carboxy terminus of the second polypeptide, wherein the CH1-CL, CL-CH1, CH1-Fc, CL-Fc, CL-CH1-Fc, or CH1-CL-Fc region is linked to the carboxy terminus of the second polypeptide via one or more amino acid linker, and wherein the CH1, CL and Fc when present in the second polypeptide are linked to each other via one or more amino acid linker. In some aspects, the first polypeptide has a structure represented by VH1-L1-VH2-L2-VL2-L3-VL1-L4-CH1-L5-CL and the second polypeptide has a structure represented by VL3-VH3, VL3-L7-VH3, VL3-L4-VH3, VL3-CL-VH3, VL3-CH1-VH3, VL3-L7-CL-L8-VH3, VL3-L7-CH1-L8-VH3, VL3-CL-L7-VH3, VL3-CH1-L7-VH3, VH3-VL3, VH3-L7-VL3, VH3-L4-VL3, VH3-CH1-VL3, VH3-CL-VL3, VH3-L7-CH1-L8-VL3, VH3-L7-CL-L8-VL3, VH3-CH1-L7-VL3, or VH3-CL-L7-VL3; optionally wherein the second polypeptide comprises at least one of an Fc region, a CL region, and a CH1 region at the carboxy terminus of the second polypeptide, or wherein second polypeptide comprises a CH1-CL, CL-CH1, CH1-Fc, CL-Fc, CL-CH1-Fc, CH1-CL-Fc at the carboxy terminus of the second polypeptide, wherein the CH1-CL, CL-CH1, CH1-Fc, CL-Fc, CL-CH1-Fc, or CH1-CL-Fc region is linked to the carboxy terminus of the second polypeptide via one or more amino acid linker, and wherein the CH1, CL and Fc when present in the second polypeptide are linked to each other via one or more amino acid linker. In some aspects, the first polypeptide has a structure represented by VH1-L1-VH2-L2-VL2-L3-VL1-L4-CL-L5-CH1 and the second polypeptide has a structure represented by VL3-VH3, VL3-L7-VH3, VL3-L4-VH3, VL3-CL-VH3, VL3-CH1-VH3, VL3-L7-CL-L8-VH3, VL3-L7-CH1-L8-VH3, VL3-CL-L7-VH3, VL3-CH1-L7-VH3, VH3-VL3, VH3-L7-VL3, VH3-L4-VL3, VH3-CH1-VL3, VH3-CL-VL3, VH3-L7-CH1-L8-VL3, VH3-L7-CL-L8-VL3, VH3-CH1-L7-VL3, or VH3-CL-L7-VL3; optionally wherein the second polypeptide comprises at least one of an Fc region, a CL region, and a CH1 region at the carboxy terminus of the second polypeptide, or wherein second polypeptide comprises a CH1-CL, CL-CH1, CH1-Fc, CL-Fc, CL-CH1-Fc, CH1-CL-Fc at the carboxy terminus of the second polypeptide, wherein the CH1-CL, CL-CH1, CH1-Fc, CL-Fc, CL-CH1-Fc, or CH1-CL-Fc region is linked to the carboxy terminus of the second polypeptide via one or more amino acid linker, and wherein the CH1, CL and Fc when present in the second polypeptide are linked to each other via one or more amino acid linker. In some aspects, the first polypeptide has a structure represented by VH1-L1-VH2-L2-VL2-L3-VL1-L4-CH1-Fc and the second polypeptide has a structure represented by VL3-VH3, VL3-L7-VH3, VL3-L4-VH3, VL3-CL-VH3, VL3-CH1-VH3, VL3-L7-CL-L8-VH3, VL3-L7-CH1-L8-VH3, VL3-CL-L7-VH3, VL3-CH1-L7-VH3, VH3-VL3, VH3-L7-VL3, VH3-L4-VL3, VH3-CH1-VL3, VH3-CL-VL3, VH3-L7-CH1-L8-VL3, VH3-L7-CL-L8-VL3, VH3-CH1-L7-VL3, or VH3-CL-L7-VL3; optionally wherein the second polypeptide comprises at least one of an Fc region, a CL region, and a CH1 region at the carboxy terminus of the second polypeptide, or wherein second polypeptide comprises a CH1-CL, CL-CH1, CH1-Fc, CL-Fc, CL-CH1-Fc, CH1-CL-Fc at the carboxy terminus of the second polypeptide, wherein the CH1-CL, CL-CH1, CH1-Fc, CL-Fc, CL-CH1-Fc, or CH1-CL-Fc region is linked to the carboxy terminus of the second polypeptide via one or more amino acid linker, and wherein the CH1, CL and Fc when present in the second polypeptide are linked to each other via one or more amino acid linker. In some aspects, the first polypeptide has a structure represented by VH1-L1-VH2-L2-VL2-L3-VL1-L4-CL-Fc and the second polypeptide has a structure represented by VL3-VH3, VL3-L7-VH3, VL3-L4-VH3, VL3-CL-VH3, VL3-CH1-VH3, VL3-L7-CL-L8-VH3, VL3-L7-CH1-L8-VH3, VL3-CL-L7-VH3, VL3-CH1-L7-VH3, VH3-VL3, VH3-L7-VL3, VH3-L4-VL3, VH3-CH1-VL3, VH3-CL-VL3, VH3-L7-CH1-L8-VL3, VH3-L7-CL-L8-VL3, VH3-CH1-L7-VL3, or VH3-CL-L7-VL3; optionally wherein the second polypeptide comprises at least one of an Fc region, a CL region, and a CH1 region at the carboxy terminus of the second polypeptide, or wherein second polypeptide comprises a CH1-CL, CL-CH1, CH1-Fc, CL-Fc, CL-CH1-Fc, CH1-CL-Fc at the carboxy terminus of the second polypeptide, wherein the CH1-CL, CL-CH1, CH1-Fc, CL-Fc, CL-CH1-Fc, or CH1-CL-Fc region is linked to the carboxy terminus of the second polypeptide via one or more amino acid linker, and wherein the CH1, CL and Fe when present in the second polypeptide are linked to each other via one or more amino acid linker. In some aspects, the first polypeptide has a structure represented by VH1-L1-VH2-L2-VL2-L3-VL1-L4-CH1-L5-CL-Fc and the second polypeptide has a structure represented by VL3-VH3, VL3-L7-VH3, VL3-L4-VH3, VL3-CL-VH3, VL3-CH1-VH3, VL3-L7-CL-L8-VH3, VL3-L7-CH1-L8-VH3, VL3-CL-L7-VH3, VL3-CH1-L7-VH3, VH3-VL3, VH3-L7-VL3, VH3-L4-VL3, VH3-CH1-VL3, VH3-CL-VL3, VH3-L7-CH1-L8-VL3, VH3-L7-CL-L8-VL3, VH3-CH1-L7-VL3, or VH3-CL-L7-VL3; optionally wherein the second polypeptide comprises at least one of an Fc region, a CL region, and a CH1 region at the carboxy terminus of the second polypeptide, or wherein second polypeptide comprises a CH1-CL, CL-CH1, CH1-Fc, CL-Fc, CL-CH1-Fc, CH1-CL-Fc at the carboxy terminus of the second polypeptide, wherein the CH1-CL, CL-CH1, CH1-Fc, CL-Fc, CL-CH1-Fc, or CH1-CL-Fc region is linked to the carboxy terminus of the second polypeptide via one or more amino acid linker, and wherein the CH1, CL and Fe when present in the second polypeptide are linked to each other via one or more amino acid linker. In some aspects, the first polypeptide has a structure represented by VH1-L1-VH2-L2-VL2-L3-VL1-L4-CL-L5-CH1-Fc and the second polypeptide has a structure represented by VL3-VH3, VL3-L7-VH3, VL3-L4-VH3, VL3-CL-VH3, VL3-CH1-VH3, VL3-L7-CL-L8-VH3, VL3-L7-CH1-L8-VH3, VL3-CL-L7-VH3, VL3-CH1-L7-VH3, VH3-VL3, VH3-L7-VL3, VH3-L4-VL3, VH3-CH1-VL3, VH3-CL-VL3, VH3-L7-CH1-L8-VL3, VH3-L7-CL-L8-VL3, VH3-CH1-L7-VL3, or VH3-CL-L7-VL3; optionally wherein the second polypeptide comprises at least one of an Fc region, a CL region, and a CH1 region at the carboxy terminus of the second polypeptide, or wherein second polypeptide comprises a CH1-CL, CL-CH1, CH1-Fc, CL-Fc, CL-CH1-Fc, CH1-CL-Fc at the carboxy terminus of the second polypeptide, wherein the CH1-CL, CL-CH1, CH1-Fc, CL-Fc, CL-CH1-Fc, or CH1-CL-Fc region is linked to the carboxy terminus of the second polypeptide via one or more amino acid linker, and wherein the CH1, CL and Fc when present in the second polypeptide are linked to each other via one or more amino acid linker. In some aspects, the first polypeptide has a structure represented by VH1-L1-VH2-L2-VL2-L3-VL1-L4-CH1-L5-Fc and the second polypeptide has a structure represented by VL3-VH3, VL3-L7-VH3, VL3-L4-VH3, VL3-CL-VH3, VL3-CH1-VH3, VL3-L7-CL-L8-VH3, VL3-L7-CH1-L8-VH3, VL3-CL-L7-VH3, VL3-CH1-L7-VH3, VH3-VL3, VH3-L7-VL3, VH3-L4-VL3, VH3-CH1-VL3, VH3-CL-VL3, VH3-L7-CH1-L8-VL3, VH3-L7-CL-L8-VL3, VH3-CH1-L7-VL3, or VH3-CL-L7-VL3; optionally wherein the second polypeptide comprises at least one of an Fc region, a CL region, and a CH1 region at the carboxy terminus of the second polypeptide, or wherein second polypeptide comprises a CH1-CL, CL-CH1, CH1-Fc, CL-Fc, CL-CH1-Fc, CH1-CL-Fc at the carboxy terminus of the second polypeptide, wherein the CH1-CL, CL-CH1, CH1-Fc, CL-Fc, CL-CH1-Fc, or CH1-CL-Fc region is linked to the carboxy terminus of the second polypeptide via one or more amino acid linker, and wherein the CH1, CL and Fc when present in the second polypeptide are linked to each other via one or more amino acid linker. In some aspects, the first polypeptide has a structure represented by VH1-L1-VH2-L2-VL2-L3-VL1-L4-CL-L5-Fe and the second polypeptide has a structure represented by VL3-VH3, VL3-L7-VH3, VL3-L4-VH3, VL3-CL-VH3, VL3-CH1-VH3, VL3-L7-CL-L8-VH3, VL3-L7-CH1-L8-VH3, VL3-CL-L7-VH3, VL3-CH1-L7-VH3, VH3-VL3, VH3-L7-VL3, VH3-L4-VL3, VH3-CH1-VL3, VH3-CL-VL3, VH3-L7-CH1-L8-VL3, VH3-L7-CL-L8-VL3, VH3-CH1-L7-VL3, or VH3-CL-L7-VL3; optionally wherein the second polypeptide comprises at least one of an Fc region, a CL region, and a CH1 region at the carboxy terminus of the second polypeptide, or wherein second polypeptide comprises a CH1-CL, CL-CH1, CH1-Fc, CL-Fc, CL-CH1-Fc, CH1-CL-Fc at the carboxy terminus of the second polypeptide, wherein the CH1-CL, CL-CH1, CH1-Fc, CL-Fc, CL-CH1-Fc, or CH1-CL-Fc region is linked to the carboxy terminus of the second polypeptide via one or more amino acid linker, and wherein the CH1, CL and Fc when present in the second polypeptide are linked to each other via one or more amino acid linker. In some aspects, the first polypeptide has a structure represented by VH1-L1-VH2-L2-VL2-L3-VL1-L4-CH1-L5-CL-L6-Fc and the second polypeptide has a structure represented by VL3-VH3, VL3-L7-VH3, VL3-L4-VH3, VL3-CL-VH3, VL3-CH1-VH3, VL3-L7-CL-L8-VH3, VL3-L7-CH1-L8-VH3, VL3-CL-L7-VH3, VL3-CH1-L7-VH3, VH3-VL3, VH3-L7-VL3, VH3-L4-VL3, VH3-CH1-VL3, VH3-CL-VL3, VH3-L7-CH1-L8-VL3, VH3-L7-CL-L8-VL3, VH3-CH1-L7-VL3, or VH3-CL-L7-VL3; optionally wherein the second polypeptide comprises at least one of an Fc region, a CL region, and a CH1 region at the carboxy terminus of the second polypeptide, or wherein second polypeptide comprises a CH1-CL, CL-CH1, CH1-Fc, CL-Fc, CL-CH1-Fc, CH1-CL-Fc at the carboxy terminus of the second polypeptide, wherein the CH1-CL, CL-CH1, CH1-Fc, CL-Fe, CL-CH1-Fc, or CH1-CL-Fc region is linked to the carboxy terminus of the second polypeptide via one or more amino acid linker, and wherein the CH1, CL and Fc when present in the second polypeptide are linked to each other via one or more amino acid linker. In some aspects, the first polypeptide has a structure represented by VH1-L1-VH2-L2-VL2-L3-VL1-L4-CL-L5-CH1-L6-Fc and the second polypeptide has a structure represented by VL3-VH3, VL3-L7-VH3, VL3-L4-VH3, VL3-CL-VH3, VL3-CH1-VH3, VL3-L7-CL-L8-VH3, VL3-L7-CH1-L8-VH3, VL3-CL-L7-VH3, VL3-CH1-L7-VH3, VH3-VL3, VH3-L7-VL3, VH3-L4-VL3, VH3-CH1-VL3, VH3-CL-VL3, VH3-L7-CH1-L8-VL3, VH3-L7-CL-L8-VL3, VH3-CH1-L7-VL3, or VH3-CL-L7-VL3; optionally wherein the second polypeptide comprises at least one of an Fc region, a CL region, and a CH1 region at the carboxy terminus of the second polypeptide, or wherein second polypeptide comprises a CH1-CL, CL-CH1, CH1-Fc, CL-Fc, CL-CH1-Fc, CH1-CL-Fc at the carboxy terminus of the second polypeptide, wherein the CH1-CL, CL-CH1, CH1-Fc, CL-Fc, CL-CH1-Fc, or CH1-CL-Fc region is linked to the carboxy terminus of the second polypeptide via one or more amino acid linker, and wherein the CH1, CL and Fc when present in the second polypeptide are linked to each other via one or more amino acid linker.

[0220] In other aspects, the invention is directed to an antigen binding polypeptide complex comprising a first polypeptide, a second polypeptide, and a third polypeptide; wherein the first polypeptide has a structure represented by VL1-VL2-VH2-VH1; VH1-VH2-VL2-VL1; VL1-L1-VL2-L2-VH2-L3-VH1; or VH1-L1-VH2-L2-VL2-L3-VL1; wherein the second polypeptide has a structure represented by VL3; wherein the third polypeptide has a structure represented by VH3; wherein VL1 is a first immunoglobulin light chain variable region that specifically binds to an HIV protein; VL2 is a second immunoglobulin light chain variable region that specifically binds to an HIV protein; VL3 is a third immunoglobulin light chain variable region that specifically binds to an HIV protein; VH1 is a first immunoglobulin heavy chain variable region that specifically binds to an HIV protein; VH2 is a second immunoglobulin heavy chain variable region that specifically binds to an HIV protein; VH3 is a third immunoglobulin heavy chain variable region that specifically binds to an HIV protein; and L1, L2 and L3 are amino acid linkers.

[0221] In other aspects, the invention is directed to an antigen binding polypeptide complex comprising a first polypeptide, a second polypeptide, and a third polypeptide; wherein the first polypeptide has a structure represented by VL1-VL2-VH2-VH1-Fc; VH1-VH2-VL2-VL1-Fc; VL1-L1-VL2-L2-VH2-L3-VH1-Fc; VH1-L1-VH2-L2-VL2-L3-VL1-Fc; VL1-L1-VL2-L2-VH2-L3-VH1-L4-Fc; or VH1-L1-VH2-L2-VL2-L3-VL1-L4-Fc; wherein the second polypeptide has a structure represented by VL3; or VL3-L5; wherein the third polypeptide has a structure represented by VH3-Fc; or VH3-L6-Fc; wherein VL1 is a first immunoglobulin light chain variable region that specifically binds to an HIV protein; VL2 is a second immunoglobulin light chain variable region that specifically binds to an HIV protein; VL3 is a third immunoglobulin light chain variable region that specifically binds to an HIV protein; VH1 is a first immunoglobulin heavy chain variable region that specifically binds to an HIV protein; VH2 is a second immunoglobulin heavy chain variable region that specifically binds to an HIV protein; VH3 is a third immunoglobulin heavy chain variable region that specifically binds to an HIV protein; Fc is a region comprising an immunoglobulin heavy chain constant region 2 (CH2), an immunoglobulin heavy chain constant region 3 (CH3), and optionally, an immunoglobulin hinge; and L1, L2, L3, L4, L5 and L6 are amino acid linkers.

[0222] In other aspects, the invention is directed to an antigen binding polypeptide complex comprising a first polypeptide, a second polypeptide, and a third polypeptide; wherein the first polypeptide has a structure represented by VL1-VL2-VH2-VH1-Fc; VH1-VH2-VL2-VL1-Fc; VL1-L1-VL2-L2-VH2-L3-VH1-Fc; VH1-L1-VH2-L2-VL2-L3-VL1-Fc; VL1-L1-VL2-L2-VH2-L3-VH1-L4-Fc; or VH1-L1-VH2-L2-VL2-L3-VL1-L4-Fc; wherein the second polypeptide has a structure represented by VL3-Fc; or VL3-L5-Fc; wherein the third polypeptide has a structure represented by VH3; or VH3-L6; wherein VL1 is a first immunoglobulin light chain variable region that specifically binds to an HIV protein; VL2 is a second immunoglobulin light chain variable region that specifically binds to an HIV protein; VL3 is a third immunoglobulin light chain variable region that specifically binds to an HIV protein; VH1 is a first immunoglobulin heavy chain variable region that specifically binds to an HIV protein; VH2 is a second immunoglobulin heavy chain variable region that specifically binds to an HIV protein; VH3 is a third immunoglobulin heavy chain variable region that specifically binds to an HIV protein; Fc is a region comprising an immunoglobulin heavy chain constant region 2 (CH2), an immunoglobulin heavy chain constant region 3 (CH3), and optionally, an immunoglobulin hinge; and L1, L2, L3, L4, L5 and L6 are amino acid linkers. In some aspects, the first polypeptide has a structure represented by VL1-VL2-VH2-VH1-Fc; VH1-VH2-VL2-VL1-Fc; VL1-L1-VL2-L2-VH2-L3-VH1-Fc; VH1-L1-VH2-L2-VL2-L3-VL1-Fc; VL1-L1-VL2-L2-VH2-L3-VH1-L4-Fc; or VH1-L1-VH2-L2-VL2-L3-VL1-L4-Fc, the second polypeptide has a structure represented by VL3-Fc, and the third polypeptide has a structure represented by VH3. In some aspects, the first polypeptide has a structure represented by VL1-VL2-VH2-VH1-Fc; VH1-VH2-VL2-VL1-Fc; VL1-L1-VL2-L2-VH2-L3-VH1-Fc; VH1-L1-VH2-L2-VL2-L3-VL1-Fc; VL1-L1-VL2-L2-VH2-L3-VH1-L4-Fc; or VH1-L1-VH2-L2-VL2-L3-VL1-L4-Fc, the second polypeptide has a structure represented by VL3-Fc, and the third polypeptide has a structure represented by VH3-L6. In some aspects, the first polypeptide has a structure represented by VL1-VL2-VH2-VH1-Fc; VH1-VH2-VL2-VL1-Fc; VL1-L1-VL2-L2-VH2-L3-VH1-Fc; VH1-L1-VH2-L2-VL2-L3-VL1-Fc; VL1-L1-VL2-L2-VH2-L3-VH1-L4-Fc; or VH1-L1-VH2-L2-VL2-L3-VL1-L4-Fc, the second polypeptide has a structure represented by VL3-L5-Fc, and the third polypeptide has a structure represented by VH3. In some aspects, the first polypeptide has a structure represented by VL1-VL2-VH2-VH1-Fc; VH1-VH2-VL2-VL1-Fc; VL1-L1-VL2-L2-VH2-L3-VH1-Fc; VH1-L1-VH2-L2-VL2-L3-VL1-Fc; VL1-L1-VL2-L2-VH2-L3-VH1-L4-Fc; or VH1-L1-VH2-L2-VL2-L3-VL1-L4-Fc, the second polypeptide has a structure represented by VL3-L5-Fc, and the third polypeptide has a structure represented by VH3-L6.

[0223] In other aspects, the invention is directed to an antigen binding polypeptide complex comprising a first polypeptide, a second polypeptide, and a third polypeptide; wherein the first polypeptide has a structure represented by VL1-VL2-VH2-VH1-CH1; VH1-VH2-VL2-VL1-CH1; VL1-VL2-VH2-VH1-CL; VH1-VH2-VL2-VL1-CL; VL1-VL2-VH2-VH1-CH1-CL; VH1-VH2-VL2-VL1-CH1-CL; VL1-VL2-VH2-VH1-CL-CH1; VH1-VH2-VL2-VL1-CL-CH1; VL1-L1-VL2-L2-VH2-L3-VH1-L4-CH1; VH1-L1-VH2-L2-VL2-L3-VL1-L4-CH1; VL1-L1-VL2-L2-VH2-L3-VH1-L4-CL; VH1-L1-VH2-L2-VL2-L3-VL1-L4-CL; VL1-L1-VL2-L2-VH2-L3-VH1-L4-CH1-L5-CL; VH1-L1-VH2-L2-VL2-L3-VL1-L4-CH1-L5-CL; VL1-L1-VL2-L2-VH2-L3-VH1-L4-CL-L5-CH1; or VH1-L1-VH2-L2-VL2-L3-VL1-L4-CL-L5-CH1; wherein the second polypeptide has a structure represented by VL3-CH1; VL3-CL; VL3-L6-CH1; or VL3-L6-CL; wherein the third polypeptide has a structure represented by VH3-CH1; VH3-CL; VH3-L7-CH1; or VH3-L7-CL; wherein VL1 is a first immunoglobulin light chain variable region that specifically binds to an HIV protein; VL2 is a second immunoglobulin light chain variable region that specifically binds to an HIV protein; VL3 is a third immunoglobulin light chain variable region that specifically binds to an HIV protein; VH1 is a first immunoglobulin heavy chain variable region that specifically binds to an HIV protein; VH2 is a second immunoglobulin heavy chain variable region that specifically binds to an HIV protein; VH3 is a third immunoglobulin heavy chain variable region that specifically binds to an HIV protein; CH1 is an immunoglobulin heavy chain constant region 1; CL is an immunoglobulin light chain constant region; and L1, L2, L3, L4, L5, L6 and L7 are amino acid linkers. In some aspects, the first polypeptide has a structure represented by VL1-VL2-VH2-VH1-CH1; VH1-VH2-VL2-VL1-CH1; VL1-VL2-VH2-VH1-CL; VH1-VH2-VL2-VL1-CL; VL1-VL2-VH2-VH1-CH1-CL; VH1-VH2-VL2-VL1-CH1-CL; VL1-VL2-VH2-VH1-CL-CH1; VH1-VH2-VL2-VL1-CL-CH1; VL1-L1-VL2-L2-VH2-L3-VH1-L4-CH1; VH1-L1-VH2-L2-VL2-L3-VL1-L4-CH1; VL1-L1-VL2-L2-VH2-L3-VH1-L4-CL; VH1-L1-VH2-L2-VL2-L3-VL1-L4-CL; VL1-L1-VL2-L2-VH2-L3-VH1-L4-CH1-L5-CL; VH1-L1-VH2-L2-VL2-L3-VL1-L4-CH1-L5-CL; VL1-L1-VL2-L2-VH2-L3-VH1-L4-CL-L5-CH1; or VH1-L1-VH2-L2-VL2-L3-VL1-L4-CL-L5-CH1, the second polypeptide has a structure represented by VL3-CH1, and the third polypeptide has a structure represented by VH3-CH1. In some aspects, the first polypeptide has a structure represented by VL1-VL2-VH2-VH1-CH1; VH1-VH2-VL2-VL1-CH1; VL1-VL2-VH2-VH1-CL; VH1-VH2-VL2-VL1-CL; VL1-VL2-VH2-VH1-CH1-CL; VH1-VH2-VL2-VL1-CH1-CL; VL1-VL2-VH2-VH1-CL-CH1; VH1-VH2-VL2-VL1-CL-CH1; VL1-L1-VL2-L2-VH2-L3-VH1-L4-CH1; VH1-L1-VH2-L2-VL2-L3-VL1-L4-CH1; VL1-L1-VL2-L2-VH2-L3-VH1-L4-CL; VH1-L1-VH2-L2-VL2-L3-VL1-L4-CL; VL1-L1-VL2-L2-VH2-L3-VH1-L4-CH1-L5-CL; VH1-L1-VH2-L2-VL2-L3-VL1-L4-CH1-L5-CL; VL1-L1-VL2-L2-VH2-L3-VH1-L4-CL-L5-CH1; or VH1-L1-VH2-L2-VL2-L3-VL1-L4-CL-L5-CH1, the second polypeptide has a structure represented by VL3-CH1, and the third polypeptide has a structure represented by VH3-CL. In some aspects, the first polypeptide has a structure represented by VL1-VL2-VH2-VH1-CH1; VH1-VH2-VL2-VL1-CH1; VL1-VL2-VH2-VH1-CL; VH1-VH2-VL2-VL1-CL; VL1-VL2-VH2-VH1-CH1-CL; VH1-VH2-VL2-VL1-CH1-CL; VL1-VL2-VH2-VH1-CL-CH1; VH1-VH2-VL2-VL1-CL-CH1; VL1-L1-VL2-L2-VH2-L3-VH1-L4-CH1; VH1-L1-VH2-L2-VL2-L3-VL1-L4-CH1; VL1-L1-VL2-L2-VH2-L3-VH1-L4-CL; VH1-L1-VH2-L2-VL2-L3-VL1-L4-CL; VL1-L1-VL2-L2-VH2-L3-VH1-L4-CH1-L5-CL; VH1-L1-VH2-L2-VL2-L3-VL1-L4-CH1-L5-CL; VL1-L1-VL2-L2-VH2-L3-VH1-L4-CL-L5-CH1; or VH1-L1-VH2-L2-VL2-L3-VL1-L4-CL-L5-CH1, the second polypeptide has a structure represented by VL3-CH1, and the third polypeptide has a structure represented by VH3-L7-CH1. In some aspects, the first polypeptide has a structure represented by VL1-VL2-VH2-VH1-CH1; VH1-VH2-VL2-VL1-CH1; VL1-VL2-VH2-VH1-CL; VH1-VH2-VL2-VL1-CL; VL1-VL2-VH2-VH1-CH1-CL; VH1-VH2-VL2-VL1-CH1-CL; VL1-VL2-VH2-VH1-CL-CH1; VH-VH2-VL2-VL1-CL-CH1; VL1-L1-VL2-L2-VH2-L3-VH1-L4-CH1; VH1-L1-VH2-L2-VL2-L3-VL1-L4-CH1; VL1-L1-VL2-L2-VH2-L3-VH1-L4-CL; VH1-L1-VH2-L2-VL2-L3-VL1-L4-CL; VL1-L1-VL2-L2-VH2-L3-VH1-L4-CH1-L5-CL; VH1-L1-VH2-L2-VL2-L3-VL1-L4-CH1-L5-CL; VL1-L1-VL2-L2-VH2-L3-VH1-L4-CL-L5-CH1; or VH1-L1-VH2-L2-VL2-L3-VL1-L4-CL-L5-CH1, the second polypeptide has a structure represented by VL3-CH1, and the third polypeptide has a structure represented by VH3-L7-CL. In some aspects, the first polypeptide has a structure represented by VL1-VL2-VH2-VH1-CH1; VH1-VH2-VL2-VL1-CH1; VL1-VL2-VH2-VH1-CL; VH1-VH2-VL2-VL1-CL; VL1-VL2-VH2-VH1-CH1-CL; VH1-VH2-VL2-VL1-CH1-CL; VL1-VL2-VH2-VH1-CL-CH1; VH-VH2-VL2-VL1-CL-CH1; VL1-L1-VL2-L2-VH2-L3-VH1-L4-CH1; VH1-L1-VH2-L2-VL2-L3-VL1-L4-CH1; VL1-L1-VL2-L2-VH2-L3-VH1-L4-CL; VH1-L1-VH2-L2-VL2-L3-VL1-L4-CL; VL1-L1-VL2-L2-VH2-L3-VH1-L4-CH-L5-CL; VH1-L1-VH2-L2-VL2-L3-VL1-L4-CH1-L5-CL; VL1-L1-VL2-L2-VH2-L3-VH-L4-CL-L5-CH1; or VH1-L1-VH2-L2-VL2-L3-VL1-L4-CL-L5-CH1, the second polypeptide has a structure represented by VL3-CL, and the third polypeptide has a structure represented by VH3-CH1. In some aspects, the first polypeptide has a structure represented by VL1-VL2-VH2-VH1-CH1; VH1-VH2-VL2-VL1-CH1; VL1-VL2-VH2-VH1-CL; VH1-VH2-VL2-VL1-CL; VL1-VL2-VH2-VH1-CH1-CL; VH-VH2-VL2-VL1-CH1-CL; VL1-VL2-VH2-VH1-CL-CH1; VH1-VH2-VL2-VL1-CL-CH1; VL1-L1-VL2-L2-VH2-L3-VH1-L4-CH1; VH1-L1-VH2-L2-VL2-L3-VL1-L4-CH1; VL1-L1-VL2-L2-VH2-L3-VH1-L4-CL; VH1-L1-VH2-L2-VL2-L3-VL1-L4-CL; VL1-L1-VL2-L2-VH2-L3-VH1-L4-CH1-L5-CL; VH1-L1-VH2-L2-VL2-L3-VL1-L4-CH1-L5-CL; VL1-L1-VL2-L2-VH2-L3-VH1-L4-CL-L5-CH1; or VH1-L1-VH2-L2-VL2-L3-VL1-L4-CL-L5-CH1, the second polypeptide has a structure represented by VL3-CL, and the third polypeptide has a structure represented by VH3-CL. In some aspects, the first polypeptide has a structure represented by VL1-VL2-VH2-VH1-CH1; VH1-VH2-VL2-VL1-CH1; VL1-VL2-VH2-VH1-CL; VH1-VH2-VL2-VL1-CL; VL1-VL2-VH2-VH1-CH1-CL; VH1-VH2-VL2-VL1-CH1-CL; VL1-VL2-VH2-VH1-CL-CH1; VH1-VH2-VL2-VL1-CL-CH1; VL1-L1-VL2-L2-VH2-L3-VH1-L4-CH1; VH1-L1-VH2-L2-VL2-L3-VL1-L4-CH1; VL1-L1-VL2-L2-VH2-L3-VH1-L4-CL; VH1-L1-VH2-L2-VL2-L3-VL1-L4-CL; VL1-L1-VL2-L2-VH2-L3-VH1-L4-CH1-L5-CL; VH1-L1-VH2-L2-VL2-L3-VL1-L4-CH1-L5-CL; VL1-L1-VL2-L2-VH2-L3-VH1-L4-CL-L5-CH1; or VH1-L1-VH2-L2-VL2-L3-VL1-L4-CL-L5-CH1, the second polypeptide has a structure represented by VL3-CL, and the third polypeptide has a structure represented by VH3-L7-CH1. In some aspects, the first polypeptide has a structure represented by VL1-VL2-VH2-VH1-CH1; VH1-VH2-VL2-VL1-CH1; VL1-VL2-VH2-VH1-CL; VH1-VH2-VL2-VL1-CL; VL1-VL2-VH2-VH1-CH1-CL; VH1-VH2-VL2-VL1-CH1-CL; VL1-VL2-VH2-VH1-CL-CH1; VH1-VH2-VL2-VL1-CL-CH1; VL1-L1-VL2-L2-VH2-L3-VH1-L4-CH1; VH1-L1-VH2-L2-VL2-L3-VL1-L4-CH1; VL1-L1-VL2-L2-VH2-L3-VH1-L4-CL; VH1-L1-VH2-L2-VL2-L3-VL1-L4-CL; VL1-L1-VL2-L2-VH2-L3-VH1-L4-CH1-L5-CL; VH1-L1-VH2-L2-VL2-L3-VL1-L4-CH1-L5-CL; VL1-L1-VL2-L2-VH2-L3-VH1-L4-CL-L5-CH1; or VH1-L1-VH2-L2-VL2-L3-VL1-L4-CL-L5-CH1, the second polypeptide has a structure represented by VL3-CL, and the third polypeptide has a structure represented by VH3-L7-CL. In some aspects, the first polypeptide has a structure represented by VL1-VL2-VH2-VH1-CH1; VH1-VH2-VL2-VL1-CH1; VL1-VL2-VH2-VH1-CL; VH1-VH2-VL2-VL1-CL; VL1-VL2-VH2-VH1-CH1-CL; VH1-VH2-VL2-VL1-CH1-CL; VL1-VL2-VH2-VH1-CL-CH1; VH1-VH2-VL2-VL1-CL-CH1; VL1-L1-VL2-L2-VH2-L3-VH1-L4-CH1; VH1-L1-VH2-L2-VL2-L3-VL1-L4-CH1; VL1-L1-VL2-L2-VH2-L3-VH1-L4-CL; VH1-L1-VH2-L2-VL2-L3-VL1-L4-CL; VL1-L1-VL2-L2-VH2-L3-VH1-L4-CH1-L5-CL; VH1-L1-VH2-L2-VL2-L3-VL1-L4-CH1-L5-CL; VL1-L1-VL2-L2-VH2-L3-VH1-L4-CL-L5-CH1; or VH1-L1-VH2-L2-VL2-L3-VL1-L4-CL-L5-CH1, the second polypeptide has a structure represented by VL3-L6-CH1, and the third polypeptide has a structure represented by VH3-CH1. In some aspects, the first polypeptide has a structure represented by VL1-VL2-VH2-VH1-CH1; VH1-VH2-VL2-VL1-CH1; VL1-VL2-VH2-VH1-CL; VH1-VH2-VL2-VL1-CL; VL1-VL2-VH2-VH1-CH1-CL; VH1-VH2-VL2-VL1-CH1-CL; VL1-VL2-VH2-VH1-CL-CH1; VH1-VH2-VL2-VL1-CL-CH1; VL1-L1-VL2-L2-VH2-L3-VH1-L4-CH1; VH1-L1-VH2-L2-VL2-L3-VL1-L4-CH1; VL1-L1-VL2-L2-VH2-L3-VH1-L4-CL; VH1-L1-VH2-L2-VL2-L3-VL1-L4-CL; VL1-L1-VL2-L2-VH2-L3-VH1-L4-CH1-L5-CL; VH1-L1-VH2-L2-VL2-L3-VL1-L4-CH1-L5-CL; VL1-L1-VL2-L2-VH2-L3-VH1-L4-CL-L5-CH1; or VH1-L1-VH2-L2-VL2-L3-VL1-L4-CL-L5-CH1, the second polypeptide has a structure represented by VL3-L6-CH1, and the third polypeptide has a structure represented by VH3-CL. In some aspects, the first polypeptide has a structure represented by VL1-VL2-VH2-VH1-CH1; VH1-VH2-VL2-VL1-CH1; VL1-VL2-VH2-VH1-CL; VH1-VH2-VL2-VL1-CL; VL1-VL2-VH2-VH1-CH1-CL; VH1-VH2-VL2-VL1-CH1-CL; VL1-VL2-VH2-VH1-CL-CH1; VH1-VH2-VL2-VL1-CL-CH1; VL1-L1-VL2-L2-VH2-L3-VH1-L4-CH1; VH1-L1-VH2-L2-VL2-L3-VL1-L4-CH1; VL1-L1-VL2-L2-VH2-L3-VH1-L4-CL; VH1-L1-VH2-L2-VL2-L3-VL1-L4-CL; VL1-L1-VL2-L2-VH2-L3-VH1-L4-CH1-L5-CL; VH1-L1-VH2-L2-VL2-L3-VL1-L4-CH1-L5-CL; VL1-L1-VL2-L2-VH2-L3-VH-L4-CL-L5-CH1; or VH1-L1-VH2-L2-VL2-L3-VL1-L4-CL-L5-CH1, the second polypeptide has a structure represented by VL3-L6-CH1, and the third polypeptide has a structure represented by VH3-L7-CH1. In some aspects, the first polypeptide has a structure represented by VL1-VL2-VH2-VH1-CH1; VH1-VH2-VL2-VL1-CH1; VL1-VL2-VH2-VH1-CL; VH1-VH2-VL2-VL1-CL; VL1-VL2-VH2-VH1-CH1-CL; VH1-VH2-VL2-VL1-CH1-CL; VL1-VL2-VH2-VH1-CL-CH1; VH1-VH2-VL2-VL1-CL-CH1; VL1-L1-VL2-L2-VH2-L3-VH1-L4-CH1; VH1-L1-VH2-L2-VL2-L3-VL1-L4-CH1; VL1-L1-VL2-L2-VH2-L3-VH1-L4-CL; VH1-L1-VH2-L2-VL2-L3-VL1-L4-CL; VL1-L1-VL2-L2-VH2-L3-VH1-L4-CH1-L5-CL; VH1-L1-VH2-L2-VL2-L3-VL1-L4-CH1-L5-CL; VL1-L1-VL2-L2-VH2-L3-VH1-L4-CL-L5-CH1; or VH1-L1-VH2-L2-VL2-L3-VL1-L4-CL-L5-CH1, the second polypeptide has a structure represented by VL3-L6-CH1, and the third polypeptide has a structure represented by VH3-L7-CL. In some aspects, the first polypeptide has a structure represented by VL1-VL2-VH2-VH1-CH1; VH1-VH2-VL2-VL1-CH1; VL1-VL2-VH2-VH1-CL; VH1-VH2-VL2-VL1-CL; VL1-VL2-VH2-VH1-CH1-CL; VH1-VH2-VL2-VL1-CH1-CL; VL1-VL2-VH2-VH1-CL-CH1; VH1-VH2-VL2-VL1-CL-CH1; VL1-L1-VL2-L2-VH2-L3-VH1-L4-CH1; VH1-L1-VH2-L2-VL2-L3-VL1-L4-CH1; VL1-L1-VL2-L2-VH2-L3-VH1-L4-CL; VH1-L1-VH2-L2-VL2-L3-VL1-L4-CL; VL1-L1-VL2-L2-VH2-L3-VH1-L4-CH1-L5-CL; VH1-L1-VH2-L2-VL2-L3-VL1-L4-CH1-L5-CL; VL1-L1-VL2-L2-VH2-L3-VH1-L4-CL-L5-CH1; or VH1-L1-VH2-L2-VL2-L3-VL1-L4-CL-L5-CH1, the second polypeptide has a structure represented by VL3-L6-CL, and the third polypeptide has a structure represented by VH3-CH1. In some aspects, the first polypeptide has a structure represented by VL1-VL2-VH2-VH1-CH1; VH1-VH2-VL2-VL1-CH1; VL1-VL2-VH2-VH1-CL; VH1-VH2-VL2-VL1-CL; VL1-VL2-VH2-VH1-CH1-CL; VH1-VH2-VL2-VL1-CH1-CL; VL1-VL2-VH2-VH1-CL-CH1; VH11-VH2-VL2-VL1-CL-CH1; VL1-L1-VL2-L2-VH2-L3-VH1-L4-CH1; VH1-L1-VH2-L2-VL2-L3-VL1-L4-CH1; VL1-L1-VL2-L2-VH2-L3-VH1-L4-CL; VH1-L1-VH2-L2-VL2-L3-VL1-L4-CL; VL1-L1-VL2-L2-VH2-L3-VH1-L4-CH1-L5-CL; VH1-L1-VH2-L2-VL2-L3-VL1-L4-CH1-L5-CL; VL1-L1-VL2-L2-VH2-L3-VH1-L4-CL-L5-CH1; or VH1-L1-VH2-L2-VL2-L3-VL1-L4-CL-L5-CH1, the second polypeptide has a structure represented by VL3-L6-CL, and the third polypeptide has a structure represented by VH3-CL. In some aspects, the first polypeptide has a structure represented by VL1-VL2-VH2-VH1-CH1; VH1-VH2-VL2-VL1-CH1; VL1-VL2-VH2-VH1-CL; VH1-VH2-VL2-VL1-CL; VL1-VL2-VH2-VH1-CH1-CL; VH1-VH2-VL2-VL1-CH1-CL; VL1-VL2-VH2-VH1-CL-CH1; VH1-VH2-VL2-VL1-CL-CH1; VL1-L1-VL2-L2-VH2-L3-VH1-L4-CH1; VH1-L1-VH2-L2-VL2-L3-VL1-L4-CH1; VL1-L1-VL2-L2-VH2-L3-VH1-L4-CL; VH1-L1-VH2-L2-VL2-L3-VL1-L4-CL; VL1-L1-VL2-L2-VH2-L3-VH1-L4-CH1-L5-CL; VH1-L1-VH2-L2-VL2-L3-VL1-L4-CH1-L5-CL; VL1-L1-VL2-L2-VH2-L3-VH1-L4-CL-L5-CH1; or VH1-L1-VH2-L2-VL2-L3-VL1-L4-CL-L5-CH1, the second polypeptide has a structure represented by VL3-L6-CL, and the third polypeptide has a structure represented by VH3-L7-CH1. In some aspects, the first polypeptide has a structure represented by VL1-VL2-VH2-VH1-CH1; VH1-VH2-VL2-VL1-CH1; VL1-VL2-VH2-VH1-CL; VH1-VH2-VL2-VL1-CL; VL1-VL2-VH2-VH1-CH1-CL; VH1-VH2-VL2-VL1-CH1-CL; VL1-VL2-VH2-VH1-CL-CH1; VH1-VH2-VL2-VL1-CL-CH1; VL1-L1-VL2-L2-VH2-L3-VH1-L4-CH1; VH1-L1-VH2-L2-VL2-L3-VL1-L4-CH1; VL1-L1-VL2-L2-VH2-L3-VH1-L4-CL; VH1-L1-VH2-L2-VL2-L3-VL1-L4-CL; VL1-L1-VL2-L2-VH2-L3-VH1-L4-CH1-L5-CL; VH1-L1-VH2-L2-VL2-L3-VL1-L4-CH1-L5-CL; VL1-L1-VL2-L2-VH2-L3-VH1-L4-CL-L5-CH1; or VH1-L1-VH2-L2-VL2-L3-VL1-L4-CL-L5-CH1, the second polypeptide has a structure represented by VL3-L6-CL, and the third polypeptide has a structure represented by VH3-L7-CL.

[0224] In other aspects, the invention is directed to an antigen binding polypeptide complex comprising a first polypeptide, a second polypeptide, and a third polypeptide; wherein the first polypeptide has a structure represented by VL1-VL2-VH2-VH1; VH1-VH2-VL2-VL1; VL1-L1-VL2-L2-VH2-L3-VH1; VH1-L1-VH2-L2-VL2-L3-VL1; VL1-VL2-VH2-VH1-Fc; VH1-VH2-VL2-VL1-Fc; VL1-L1-VL2-L2-VH2-L3-VH1-Fc; VH1-L1-VH2-L2-VL2-L3-VL1-Fc; VL1-L1-VL2-L2-VH2-L3-VH1-L4-Fc; VH1-L1-VH2-L2-VL2-L3-VL1-L4-Fc; VL1-VL2-VH2-VH1-CH1; VH1-VH2-VL2-VL1-CH1; VL1-VL2-VH2-VH1-CL; VH1-VH2-VL2-VL1-CL; VL1-VL2-VH2-VH1-CH1-CL; VH1-VH2-VL2-VL1-CH1-CL; VL1-VL2-VH2-VH1-CL-CH1; VH1-VH2-VL2-VL1-CL-CH1; VL1-L1-VL2-L2-VH2-L3-VH1-L4-CH1; VH1-L1-VH2-L2-VL2-L3-VL1-L4-CH1; VL1-L1-VL2-L2-VH2-L3-VH1-L4-CL; VH1-L1-VH2-L2-VL2-L3-VL1-L4-CL; VL1-L1-VL2-L2-VH2-L3-VH1-L4-CH1-L5-CL; VH1-L1-VH2-L2-VL2-L3-VL1-L4-CH1-L5-CL; VL1-L1-VL2-L2-VH2-L3-VH1-L4-CL-L5-CH1; VH1-L1-VH2-L2-VL2-L3-VL1-L4-CL-L5-CH1; VL1-VL2-VH2-VH1-CH1-Fc; VH1-VH2-VL2-VL1-CH1-Fc; VL1-VL2-VH2-VH1-CL-Fc; VH1-VH2-VL2-VL1-CL-Fc; VL1-VL2-VH2-VH1-CH1-CL-Fc; VH1-VH2-VL2-VL1-CH1-CL-Fc; VL1-VL2-VH2-VH1-CL-CH1-Fc; VH1-VH2-VL2-VL1-CL-CH1-Fc; VL1-L1-VL2-L2-VH2-L3-VH1-L4-CH1-Fc; VH1-L1-VH2-L2-VL2-L3-VL1-L4-CH1-Fc; VL1-L1-VL2-L2-VH2-L3-VH1-L4-CL-Fc; VH1-L1-VH2-L2-VL2-L3-VL1-L4-CL-Fc; VL1-L1-VL2-L2-VH2-L3-VH-L4-CH-L5-CL-Fe; VH1-L1-VH2-L2-VL2-L3-VL1-L4-CH1-L5-CL-Fc; VL1-L1-VL2-L2-VH2-L3-VH1-L4-CL-L5-CH1-Fc; VH1-L1-VH2-L2-VL2-L3-VL1-L4-CL-L5-CH1-Fc; VL1-L1-VL2-L2-VH2-L3-VH1-L4-CH1-L5-Fc; VH1-L1-VH2-L2-VL2-L3-VL1-L4-CH1-L5-Fc; VL1-L1-VL2-L2-VH2-L3-VH1-L4-CL-L5-Fc; VH1-L1-VH2-L2-VL2-L3-VL1-L4-CL-L5-Fc; VL1-L1-VL2-L2-VH2-L3-VH1-L4-CH1-L5-CL-L6-Fc; VH1-L1-VH2-L2-VL2-L3-VL1-L4-CH1-L5-CL-L6-Fc; VL1-L1-VL2-L2-VH2-L3-VH1-L4-CL-L5-CH-L6-Fc; or VH1-L1-VH2-L2-VL2-L3-VL1-L4-CL-L5-CH1-L6-Fc; wherein the second polypeptide has a structure represented by VL3; VL3-Fc; VL3-CH1; VL3-CL; VL3-CH1-CL; VL3-CL-CH1; VL3-CH1-Fc; VL3-CL-Fc; VL3-CH1-CL-Fc; VL3-CL-CH1-Fc; VL3-L7-Fc; VL3-L7-CH1; VL3-L7-CL; VL3-L7-CH1-L8-CL; VL3-L7-CL-L8-CH1; VL3-L7-CH1-L8-Fc; VL3-L7-CL-L8-Fc; VL3-L7-CH1-L8-CL-Fc; VL3-L7-CL-L8-CH1-Fc; VL3-L7-CH1-L8-CL-L9-Fc; or VL3-L7-CL-L8-CH1-L9-Fc; wherein the third polypeptide has a structure represented by VH3; VH3-Fc; VH3-CH1; VH3-CL; VH3-CH1-CL; VH3-CL-CH1; VH3-CH1-Fc; VH3-CL-Fc; VH3-CH1-CL-Fc; VH3-CL-CH1-Fc; VH3-L10-Fc; VH3-L10-CH1; VH3-L10-CL; VH3-L10-CH1-L11-CL; VH3-L10-CL-L11-CH1; VH3-L10-CH1-L11-Fc; VH3-L10-CL-L11-Fc; VH3-L10-CH1-L11-CL-Fc; VH3-L10-CL-L11-CH1-Fc; VH3-L10-CH1-L11-CL-L12-Fc; or VH3-L10-CL-L11-CH1-L12-Fc; wherein VL1 is a first immunoglobulin light chain variable region that specifically binds to an HIV protein; VL2 is a second immunoglobulin light chain variable region that specifically binds to an HIV protein; VL3 is a third immunoglobulin light chain variable region that specifically binds to an HIV protein; VH1 is a first immunoglobulin heavy chain variable region that specifically binds to an HIV protein; VH2 is a second immunoglobulin heavy chain variable region that specifically binds to an HIV protein; VH3 is a third immunoglobulin heavy chain variable region that specifically binds to an HIV protein; Fc is a region comprising an immunoglobulin heavy chain constant region 2 (CH2), an immunoglobulin heavy chain constant region 3 (CH3), and optionally, an immunoglobulin hinge; CH1 is an immunoglobulin heavy chain constant region 1; CL is an immunoglobulin light chain constant region; and L1, L2, L3, L4, L5, L6, L7, L8, L9, L10, L11 and L12 are amino acid linkers. In some aspects, the first polypeptide has a structure represented by VL1-VL2-VH2-VH1, the second polypeptide has a structure represented by VL3, and the third polypeptide has a structure represented by VH3; optionally wherein the first, second and/or third polypeptide comprises at least one of an Fc region, a CL region, and a CH1 region at the carboxy terminus of the first, second and/or third polypeptide, or wherein the first, second and/or third polypeptide comprises a CH1-CL, CL-CH1, CH1-Fc, CL-Fc, CL-CH1-Fc, CH1-CL-Fc at the carboxy terminus of the first, second and/or third polypeptide. In some aspects, the first polypeptide has a structure represented by VL1-VL2-VH2-VH1, the second polypeptide has a structure represented by VL3, and the third polypeptide has a structure represented by VH3; optionally wherein the first, second and/or third polypeptide comprises at least one of an Fc region, a CL region, and a CH1 region at the carboxy terminus of the first, second and/or third polypeptide, or wherein the first, second and/or third polypeptide comprises a CH1-CL, CL-CH1, CH1-Fc, CL-Fc, CL-CH1-Fc, CH1-CL-Fc at the carboxy terminus of the first, second and/or third polypeptide, wherein the CH1-CL, CL-CH1, CH1-Fc, CL-Fc, CL-CH1-Fc, or CH1-CL-Fc region is linked to the carboxy terminus of the second polypeptide via one or more amino acid linker, and wherein the CH1, CL and Fc when present in the second polypeptide are linked to each other via one or more amino acid linker. In some aspects, the first polypeptide has a structure represented by VL1-VL2-VH2-VH1, the second polypeptide has a structure represented by VL3, and the third polypeptide has a structure represented by VH3; optionally wherein the first, second and/or third polypeptide comprises at least one of an Fc region, a CL region, and a CH1 region at the carboxy terminus of the first, second and/or third polypeptide, or wherein the first, second and/or third polypeptide comprises a CH1-CL, CL-CH1, CH1-Fc, CL-Fc, CL-CH1-Fc, CH1-CL-Fc at the carboxy terminus of the first, second and/or third polypeptide, wherein the CH1-CL, CL-CH1, CH1-Fc, CL-Fc, CL-CH1-Fc, or CH1-CL-Fc region is linked to the carboxy terminus of the third polypeptide via one or more amino acid linker, and wherein the CH1, CL and Fc when present in the third polypeptide are linked to each other via one or more amino acid linker. In some aspects, the first polypeptide has a structure represented by VL1-VL2-VH2-VH1, the second polypeptide has a structure represented by VL3, and the third polypeptide has a structure represented by VH3; optionally wherein the first, second and/or third polypeptide comprises at least one of an Fc region, a CL region, and a CH1 region at the carboxy terminus of the first, second and/or third polypeptide, or wherein the first, second and/or third polypeptide comprises a CH1-CL, CL-CH1, CH1-Fc, CL-Fc, CL-CH1-Fc, CH1-CL-Fc at the carboxy terminus of the first, second and/or third polypeptide, wherein the CH1-CL, CL-CH1, CH1-Fc, CL-Fc, CL-CH1-Fc, or CH1-CL-Fc region is linked to the carboxy terminus of the second and third polypeptide via one or more amino acid linker, and wherein the CH1, CL and Fc when present in the second and third polypeptide are linked to each other via one or more amino acid linker. In some aspects, the first polypeptide has a structure represented by VH1-VH2-VL2-VL1, the second polypeptide has a structure represented by VL3, and the third polypeptide has a structure represented by VH3; optionally wherein the first, second and/or third polypeptide comprises at least one of an Fc region, a CL region, and a CH1 region at the carboxy terminus of the first, second and/or third polypeptide, or wherein the first, second and/or third polypeptide comprises a CH1-CL, CL-CH1, CH1-Fc, CL-Fc, CL-CH1-Fc, CH1-CL-Fc at the carboxy terminus of the first, second and/or third polypeptide. In some aspects, the first polypeptide has a structure represented by VH1-VH2-VL2-VL1, the second polypeptide has a structure represented by VL3, and the third polypeptide has a structure represented by VH3; optionally wherein the first, second and/or third polypeptide comprises at least one of an Fc region, a CL region, and a CH1 region at the carboxy terminus of the first, second and/or third polypeptide, or wherein the first, second and/or third polypeptide comprises a CH1-CL, CL-CH1, CH1-Fc, CL-Fc, CL-CH1-Fc, CH1-CL-Fc at the carboxy terminus of the first, second and/or third polypeptide, wherein the CH1-CL, CL-CH1, CH1-Fc, CL-Fc, CL-CH1-Fc, or CH1-CL-Fc region is linked to the carboxy terminus of the second polypeptide via one or more amino acid linker, and wherein the CH1, CL and Fc when present in the second polypeptide are linked to each other via one or more amino acid linker. In some aspects, the first polypeptide has a structure represented by VH1-VH2-VL2-VL1, the second polypeptide has a structure represented by VL3, and the third polypeptide has a structure represented by VH3; optionally wherein the first, second and/or third polypeptide comprises at least one of an Fc region, a CL region, and a CH1 region at the carboxy terminus of the first, second and/or third polypeptide, or wherein the first, second and/or third polypeptide comprises a CH1-CL, CL-CH1, CH1-Fc, CL-Fc, CL-CH1-Fc, CH1-CL-Fc at the carboxy terminus of the first, second and/or third polypeptide, wherein the CH1-CL, CL-CH1, CH1-Fc, CL-Fc, CL-CH1-Fc, or CH1-CL-Fc region is linked to the carboxy terminus of the third polypeptide via one or more amino acid linker, and wherein the CH1, CL and Fc when present in the third polypeptide are linked to each other via one or more amino acid linker. In some aspects, the first polypeptide has a structure represented by VH1-VH2-VL2-VL1, the second polypeptide has a structure represented by VL3, and the third polypeptide has a structure represented by VH3; optionally wherein the first, second and/or third polypeptide comprises at least one of an Fc region, a CL region, and a CH1 region at the carboxy terminus of the first, second and/or third polypeptide, or wherein the first, second and/or third polypeptide comprises a CH1-CL, CL-CH1, CH1-Fc, CL-Fc, CL-CH1-Fc, CH1-CL-Fc at the carboxy terminus of the first, second and/or third polypeptide, wherein the CH1-CL, CL-CH1, CH1-Fc, CL-Fc, CL-CH1-Fc, or CH1-CL-Fc region is linked to the carboxy terminus of the second and third polypeptide via one or more amino acid linker, and wherein the CH1, CL and Fc when present in the second and third polypeptide are linked to each other via one or more amino acid linker. In some aspects, the first polypeptide has a structure represented by VL1-L1-VL2-L2-VH2-L3-VH1, the second polypeptide has a structure represented by VL3, and the third polypeptide has a structure represented by VH3; optionally wherein the first, second and/or third polypeptide comprises at least one of an Fc region, a CL region, and a CH1 region at the carboxy terminus of the first, second and/or third polypeptide, or wherein the first, second and/or third polypeptide comprises a CH1-CL, CL-CH1, CH1-Fc, CL-Fc, CL-CH1-Fc, CH1-CL-Fc at the carboxy terminus of the first, second and/or third polypeptide. In some aspects, the first polypeptide has a structure represented by VL1-L1-VL2-L2-VH2-L3-VH1, the second polypeptide has a structure represented by VL3, and the third polypeptide has a structure represented by VH3; optionally wherein the first, second and/or third polypeptide comprises at least one of an Fc region, a CL region, and a CH1 region at the carboxy terminus of the first, second and/or third polypeptide, or wherein the first, second and/or third polypeptide comprises a CH1-CL, CL-CH1, CH1-Fc, CL-Fc, CL-CH1-Fc, CH1-CL-Fc at the carboxy terminus of the first, second and/or third polypeptide, wherein the CH1-CL, CL-CH1, CH1-Fc, CL-Fc, CL-CH1-Fc, or CH1-CL-Fc region is linked to the carboxy terminus of the second polypeptide via one or more amino acid linker, and wherein the CH1, CL and Fc when present in the second polypeptide are linked to each other via one or more amino acid linker. In some aspects, the first polypeptide has a structure represented by VL1-L1-VL2-L2-VH2-L3-VH1, the second polypeptide has a structure represented by VL3, and the third polypeptide has a structure represented by VH3; optionally wherein the first, second and/or third polypeptide comprises at least one of an Fc region, a CL region, and a CH1 region at the carboxy terminus of the first, second and/or third polypeptide, or wherein the first, second and/or third polypeptide comprises a CH1-CL, CL-CH1, CH1-Fc, CL-Fc, CL-CH1-Fc, CH1-CL-Fc at the carboxy terminus of the first, second and/or third polypeptide, wherein the CH1-CL, CL-CH1, CH1-Fc, CL-Fc, CL-CH1-Fc, or CH1-CL-Fc region is linked to the carboxy terminus of the third polypeptide via one or more amino acid linker, and wherein the CH1, CL and Fc when present in the third polypeptide are linked to each other via one or more amino acid linker. In some aspects, the first polypeptide has a structure represented by VL1-L1-VL2-L2-VH2-L3-VH1, the second polypeptide has a structure represented by VL3, and the third polypeptide has a structure represented by VH3; optionally wherein the first, second and/or third polypeptide comprises at least one of an Fc region, a CL region, and a CH1 region at the carboxy terminus of the first, second and/or third polypeptide, or wherein the first, second and/or third polypeptide comprises a CH1-CL, CL-CH1, CH1-Fc, CL-Fc, CL-CH1-Fc, CH1-CL-Fc at the carboxy terminus of the first, second and/or third polypeptide, wherein the CH1-CL, CL-CH1, CH1-Fc, CL-Fc, CL-CH1-Fc, or CH1-CL-Fc region is linked to the carboxy terminus of the second and third polypeptide via one or more amino acid linker, and wherein the CH1, CL and Fc when present in the second and third polypeptide are linked to each other via one or more amino acid linker. In some aspects, the first polypeptide has a structure represented by VH1-L1-VH2-L2-VL2-L3-VL1, the second polypeptide has a structure represented by VL3, and the third polypeptide has a structure represented by VH3; optionally wherein the first, second and/or third polypeptide comprises at least one of an Fc region, a CL region, and a CH1 region at the carboxy terminus of the first, second and/or third polypeptide, or wherein the first, second and/or third polypeptide comprises a CH1-CL, CL-CH1, CH1-Fc, CL-Fc, CL-CH1-Fc, CH1-CL-Fc at the carboxy terminus of the first, second and/or third polypeptide. In some aspects, the first polypeptide has a structure represented by VH1-L1-VH2-L2-VL2-L3-VL1, the second polypeptide has a structure represented by VL3, and the third polypeptide has a structure represented by VH3; optionally wherein the first, second and/or third polypeptide comprises at least one of an Fc region, a CL region, and a CH1 region at the carboxy terminus of the first, second and/or third polypeptide, or wherein the first, second and/or third polypeptide comprises a CH1-CL, CL-CH1, CH1-Fc, CL-Fc, CL-CH1-Fc, CH1-CL-Fc at the carboxy terminus of the first, second and/or third polypeptide, wherein the CH1-CL, CL-CH1, CH1-Fc, CL-Fc, CL-CH1-Fc, or CH1-CL-Fc region is linked to the carboxy terminus of the second polypeptide via one or more amino acid linker, and wherein the CH1, CL and Fc when present in the second polypeptide are linked to each other via one or more amino acid linker. In some aspects, the first polypeptide has a structure represented by VH1-L1-VH2-L2-VL2-L3-VL1, the second polypeptide has a structure represented by VL3, and the third polypeptide has a structure represented by VH3; optionally wherein the first, second and/or third polypeptide comprises at least one of an Fc region, a CL region, and a CH1 region at the carboxy terminus of the first, second and/or third polypeptide, or wherein the first, second and/or third polypeptide comprises a CH1-CL, CL-CH1, CH1-Fc, CL-Fc, CL-CH1-Fc, CH1-CL-Fc at the carboxy terminus of the first, second and/or third polypeptide, wherein the CH1-CL, CL-CH1, CH1-Fc, CL-Fc, CL-CH1-Fc, or CH1-CL-Fc region is linked to the carboxy terminus of the third polypeptide via one or more amino acid linker, and wherein the CH1, CL and Fc when present in the third polypeptide are linked to each other via one or more amino acid linker. In some aspects, the first polypeptide has a structure represented by VH1-L1-VH2-L2-VL2-L3-VL1, the second polypeptide has a structure represented by VL3, and the third polypeptide has a structure represented by VH3; optionally wherein the first, second and/or third polypeptide comprises at least one of an Fc region, a CL region, and a CH1 region at the carboxy terminus of the first, second and/or third polypeptide, or wherein the first, second and/or third polypeptide comprises a CH1-CL, CL-CH1, CH1-Fc, CL-Fc, CL-CH1-Fc, CH1-CL-Fc at the carboxy terminus of the first, second and/or third polypeptide, wherein the CH1-CL, CL-CH1, CH1-Fc, CL-Fc, CL-CH1-Fc, or CH1-CL-Fc region is linked to the carboxy terminus of the second and third polypeptide via one or more amino acid linker, and wherein the CH1, CL and Fc when present in the second and third polypeptide are linked to each other via one or more amino acid linker. In some aspects, the first polypeptide has a structure represented by VL1-L1-VL2-L2-VH2-L3-VH1-L4-Fc, the second polypeptide has a structure represented by VL3, and the third polypeptide has a structure represented by VH3; optionally wherein the second and/or third polypeptide comprises at least one of an Fc region, a CL region, and a CH1 region at the carboxy terminus of the second and/or third polypeptide, or wherein the second and/or third polypeptide comprises a CH1-CL, CL-CH1, CH1-Fe, CL-Fc, CL-CH1-Fc, CH1-CL-Fc at the carboxy terminus of the second and/or third polypeptide. In some aspects, the first polypeptide has a structure represented by VL1-L1-VL2-L2-VH2-L3-VH1-L4-Fc, the second polypeptide has a structure represented by VL3, and the third polypeptide has a structure represented by VH3; optionally wherein the second and/or third polypeptide comprises at least one of an Fc region, a CL region, and a CH1 region at the carboxy terminus of the second and/or third polypeptide, or wherein the second and/or third polypeptide comprises a CH1-CL, CL-CH1, CH1-Fc, CL-Fc, CL-CH1-Fc, CH1-CL-Fc at the carboxy terminus of the second and/or third polypeptide, wherein the CH1-CL, CL-CH1, CH1-Fc, CL-Fc, CL-CH1-Fc, or CH1-CL-Fc region is linked to the carboxy terminus of the second polypeptide via one or more amino acid linker, and wherein the CH1, CL and Fc when present in the second polypeptide are linked to each other via one or more amino acid linker. In some aspects, the first polypeptide has a structure represented by VL1-L1-VL2-L2-VH2-L3-VH1-L4-Fc, the second polypeptide has a structure represented by VL3, and the third polypeptide has a structure represented by VH3; optionally wherein the second and/or third polypeptide comprises at least one of an Fc region, a CL region, and a CH1 region at the carboxy terminus of the second and/or third polypeptide, or wherein the second and/or third polypeptide comprises a CH1-CL, CL-CH1, CH1-Fc, CL-Fe, CL-CH1-Fc, CH1-CL-Fc at the carboxy terminus of the second and/or third polypeptide, wherein the CH1-CL, CL-CH1, CH1-Fc, CL-Fc, CL-CH1-Fc, or CH1-CL-Fc region is linked to the carboxy terminus of the third polypeptide via one or more amino acid linker, and wherein the CH1, CL and Fc when present in the third polypeptide are linked to each other via one or more amino acid linker. In some aspects, the first polypeptide has a structure represented by VL1-L1-VL2-L2-VH2-L3-VH1-L4-Fc, the second polypeptide has a structure represented by VL3, and the third polypeptide has a structure represented by VH3; optionally wherein the second and/or third polypeptide comprises at least one of an Fc region, a CL region, and a CH1 region at the carboxy terminus of the second and/or third polypeptide, or wherein the second and/or third polypeptide comprises a CH1-CL, CL-CH1, CH1-Fc, CL-Fc, CL-CH1-Fc, CH1-CL-Fc at the carboxy terminus of the second and/or third polypeptide, wherein the CH1-CL, CL-CH1, CH1-Fc, CL-Fc, CL-CH1-Fc, or CH1-CL-Fc region is linked to the carboxy terminus of the second and third polypeptide via one or more amino acid linker, and wherein the CH1, CL and Fe when present in the second and third polypeptide are linked to each other via one or more amino acid linker. In some aspects, the first polypeptide has a structure represented by VH1-L1-VH2-L2-VL2-L3-VL1-L4-Fc, the second polypeptide has a structure represented by VL3, and the third polypeptide has a structure represented by VH3; optionally wherein the second and/or third polypeptide comprises at least one of an Fe region, a CL region, and a CH1 region at the carboxy terminus of the second and/or third polypeptide, or wherein the second and/or third polypeptide comprises a CH1-CL, CL-CH1, CH1-Fc, CL-Fc, CL-CH1-Fc, CH1-CL-Fc at the carboxy terminus of the second and/or third polypeptide. In some aspects, the first polypeptide has a structure represented by VH1-L1-VH2-L2-VL2-L3-VL1-L4-Fc, the second polypeptide has a structure represented by VL3, and the third polypeptide has a structure represented by VH3; optionally wherein the second and/or third polypeptide comprises at least one of an Fc region, a CL region, and a CH1 region at the carboxy terminus of the second and/or third polypeptide, or wherein the second and/or third polypeptide comprises a CH1-CL, CL-CH1, CH1-Fc, CL-Fc, CL-CH1-Fc, CH1-CL-Fc at the carboxy terminus of the second and/or third polypeptide, wherein the CH1-CL, CL-CH1, CH1-Fc, CL-Fc, CL-CH1-Fc, or CH1-CL-Fc region is linked to the carboxy terminus of the second polypeptide via one or more amino acid linker, and wherein the CH1, CL and Fc when present in the second polypeptide are linked to each other via one or more amino acid linker. In some aspects, the first polypeptide has a structure represented by VH1-L1-VH2-L2-VL2-L3-VL1-L4-Fc, the second polypeptide has a structure represented by VL3, and the third polypeptide has a structure represented by VH3; optionally wherein the second and/or third polypeptide comprises at least one of an Fc region, a CL region, and a CH1 region at the carboxy terminus of the second and/or third polypeptide, or wherein the second and/or third polypeptide comprises a CH1-CL, CL-CH1, CH1-Fc, CL-Fc, CL-CH1-Fc, CH1-CL-Fc at the carboxy terminus of the second and/or third polypeptide, wherein the CH1-CL, CL-CH1, CH1-Fc, CL-Fc, CL-CH1-Fc, or CH1-CL-Fc region is linked to the carboxy terminus of the third polypeptide via one or more amino acid linker, and wherein the CH1, CL and Fc when present in the third polypeptide are linked to each other via one or more amino acid linker. In some aspects, the first polypeptide has a structure represented by VH1-L1-VH2-L2-VL2-L3-VL1-L4-Fc, the second polypeptide has a structure represented by VL3, and the third polypeptide has a structure represented by VH3; optionally wherein the second and/or third polypeptide comprises at least one of an Fc region, a CL region, and a CH1 region at the carboxy terminus of the second and/or third polypeptide, or wherein the second and/or third polypeptide comprises a CH1-CL, CL-CH1, CH1-Fc, CL-Fc, CL-CH1-Fc, CH1-CL-Fc at the carboxy terminus of the second and/or third polypeptide, wherein the CH1-CL, CL-CH1, CH1-Fc, CL-Fc, CL-CH1-Fc, or CH1-CL-Fc region is linked to the carboxy terminus of the second and third polypeptide via one or more amino acid linker, and wherein the CH1, CL and Fc when present in the second and third polypeptide are linked to each other via one or more amino acid linker. In some aspects, the first polypeptide has a structure represented by VL1-L1-VL2-L2-VH2-L3-VH1-L4-CH1, the second polypeptide has a structure represented by VL3, and the third polypeptide has a structure represented by VH3; optionally wherein the second and/or third polypeptide comprises at least one of an Fc region, a CL region, and a CH1 region at the carboxy terminus of the second and/or third polypeptide, or wherein the second and/or third polypeptide comprises a CH1-CL, CL-CH1, CH1-Fc, CL-Fc, CL-CH1-Fc, CH1-CL-Fc at the carboxy terminus of the second and/or third polypeptide. In some aspects, the first polypeptide has a structure represented by VL1-L1-VL2-L2-VH2-L3-VH1-L4-CH1, the second polypeptide has a structure represented by VL3, and the third polypeptide has a structure represented by VH3; optionally wherein the second and/or third polypeptide comprises at least one of an Fc region, a CL region, and a CH1 region at the carboxy terminus of the second and/or third polypeptide, or wherein the second and/or third polypeptide comprises a CH1-CL, CL-CH1, CH1-Fc, CL-Fc, CL-CH1-Fc, CH1-CL-Fc at the carboxy terminus of the second and/or third polypeptide, wherein the CH1-CL, CL-CH1, CH1-Fc, CL-Fc, CL-CH1-Fc, or CH1-CL-Fc region is linked to the carboxy terminus of the second polypeptide via one or more amino acid linker, and wherein the CH1, CL and Fe when present in the second polypeptide are linked to each other via one or more amino acid linker. In some aspects, the first polypeptide has a structure represented by VL1-L1-VL2-L2-VH2-L3-VH1-L4-CH1, the second polypeptide has a structure represented by VL3, and the third polypeptide has a structure represented by VH3; optionally wherein the second and/or third polypeptide comprises at least one of an Fc region, a CL region, and a CH1 region at the carboxy terminus of the second and/or third polypeptide, or wherein the second and/or third polypeptide comprises a CH1-CL, CL-CH1, CH1-Fc, CL-Fc, CL-CH1-Fc, CH1-CL-Fc at the carboxy terminus of the second and/or third polypeptide, wherein the CH1-CL, CL-CH1, CH1-Fc, CL-Fc, CL-CH1-Fc, or CH1-CL-Fc region is linked to the carboxy terminus of the third polypeptide via one or more amino acid linker, and wherein the CH1, CL and Fc when present in the third polypeptide are linked to each other via one or more amino acid linker. In some aspects, the first polypeptide has a structure represented by VL1-L1-VL2-L2-VH2-L3-VH1-L4-CH1, the second polypeptide has a structure represented by VL3, and the third polypeptide has a structure represented by VH3; optionally wherein the second and/or third polypeptide comprises at least one of an Fc region, a CL region, and a CH1 region at the carboxy terminus of the second and/or third polypeptide, or wherein the second and/or third polypeptide comprises a CH1-CL, CL-CH1, CH1-Fc, CL-Fc, CL-CH1-Fc, CH1-CL-Fc at the carboxy terminus of the second and/or third polypeptide, wherein the CH1-CL, CL-CH1, CH1-Fc, CL-Fc, CL-CH1-Fc, or CH1-CL-Fc region is linked to the carboxy terminus of the second and third polypeptide via one or more amino acid linker, and wherein the CH1, CL and Fc when present in the second and third polypeptide are linked to each other via one or more amino acid linker. In some aspects, the first polypeptide has a structure represented by VH1-L1-VH2-L2-VL2-L3-VL1-L4-CH1, the second polypeptide has a structure represented by VL3, and the third polypeptide has a structure represented by VH3; optionally wherein the second and/or third polypeptide comprises at least one of an Fc region, a CL region, and a CH1 region at the carboxy terminus of the second and/or third polypeptide, or wherein the second and/or third polypeptide comprises a CH1-CL, CL-CH1, CH1-Fc, CL-Fc, CL-CH1-Fc, CH1-CL-Fc at the carboxy terminus of the second and/or third polypeptide. In some aspects, the first polypeptide has a structure represented by VH1-L1-VH2-L2-VL2-L3-VL1-L4-CH1, the second polypeptide has a structure represented by VL3, and the third polypeptide has a structure represented by VH3; optionally wherein the second and/or third polypeptide comprises at least one of an Fc region, a CL region, and a CH1 region at the carboxy terminus of the second and/or third polypeptide, or wherein the second and/or third polypeptide comprises a CH1-CL, CL-CH1, CH1-Fc, CL-Fc, CL-CH1-Fc, CH1-CL-Fc at the carboxy terminus of the second and/or third polypeptide, wherein the CH1-CL, CL-CH1, CH1-Fc, CL-Fc, CL-CH1-Fc, or CH1-CL-Fc region is linked to the carboxy terminus of the second polypeptide via one or more amino acid linker, and wherein the CH1, CL and Fc when present in the second polypeptide are linked to each other via one or more amino acid linker. In some aspects, the first polypeptide has a structure represented by VH1-L1-VH2-L2-VL2-L3-VL1-L4-CH1, the second polypeptide has a structure represented by VL3, and the third polypeptide has a structure represented by VH3; optionally wherein the second and/or third polypeptide comprises at least one of an Fc region, a CL region, and a CH1 region at the carboxy terminus of the second and/or third polypeptide, or wherein the second and/or third polypeptide comprises a CH1-CL, CL-CH1, CH1-Fc, CL-Fc, CL-CH1-Fc, CH1-CL-Fc at the carboxy terminus of the second and/or third polypeptide, wherein the CH1-CL, CL-CH1, CH1-Fc, CL-Fc, CL-CH1-Fc, or CH1-CL-Fc region is linked to the carboxy terminus of the third polypeptide via one or more amino acid linker, and wherein the CH1, CL and Fc when present in the third polypeptide are linked to each other via one or more amino acid linker. In some aspects, the first polypeptide has a structure represented by VH1-L1-VH2-L2-VL2-L3-VL1-L4-CH1, the second polypeptide has a structure represented by VL3, and the third polypeptide has a structure represented by VH3; optionally wherein the second and/or third polypeptide comprises at least one of an Fc region, a CL region, and a CH1 region at the carboxy terminus of the second and/or third polypeptide, or wherein the second and/or third polypeptide comprises a CH1-CL, CL-CH1, CH1-Fc, CL-Fc, CL-CH1-Fc, CH1-CL-Fc at the carboxy terminus of the second and/or third polypeptide, wherein the CH1-CL, CL-CH1, CH1-Fc, CL-Fc, CL-CH1-Fc, or CH1-CL-Fc region is linked to the carboxy terminus of the second and third polypeptide via one or more amino acid linker, and wherein the CH1, CL and Fc when present in the second and third polypeptide are linked to each other via one or more amino acid linker. In some aspects, the first polypeptide has a structure represented by VL1-L1-VL2-L2-VH2-L3-VH1-L4-CL, the second polypeptide has a structure represented by VL3, and the third polypeptide has a structure represented by VH3; optionally wherein the second and/or third polypeptide comprises at least one of an Fc region, a CL region, and a CH1 region at the carboxy terminus of the second and/or third polypeptide, or wherein the second and/or third polypeptide comprises a CH1-CL, CL-CH1, CH1-Fc, CL-Fc, CL-CH1-Fc, CH1-CL-Fc at the carboxy terminus of the second and/or third polypeptide. In some aspects, the first polypeptide has a structure represented by VL1-L1-VL2-L2-VH2-L3-VH1-L4-CL, the second polypeptide has a structure represented by VL3, and the third polypeptide has a structure represented by VH3; optionally wherein the second and/or third polypeptide comprises at least one of an Fc region, a CL region, and a CH1 region at the carboxy terminus of the second and/or third polypeptide, or wherein the second and/or third polypeptide comprises a CH1-CL, CL-CH1, CH1-Fc, CL-Fc, CL-CH1-Fc, CH1-CL-Fc at the carboxy terminus of the second and/or third polypeptide, wherein the CH1-CL, CL-CH1, CH1-Fc, CL-Fc, CL-CH1-Fc, or CH1-CL-Fc region is linked to the carboxy terminus of the second polypeptide via one or more amino acid linker, and wherein the CH1, CL and Fc when present in the second polypeptide are linked to each other via one or more amino acid linker. In some aspects, the first polypeptide has a structure represented by VL1-L1-VL2-L2-VH2-L3-VH1-L4-CL, the second polypeptide has a structure represented by VL3, and the third polypeptide has a structure represented by VH3; optionally wherein the second and/or third polypeptide comprises at least one of an Fc region, a CL region, and a CH1 region at the carboxy terminus of the second and/or third polypeptide, or wherein the second and/or third polypeptide comprises a CH1-CL, CL-CH1, CH1-Fc, CL-Fc, CL-CH1-Fc, CH1-CL-Fc at the carboxy terminus of the second and/or third polypeptide, wherein the CH1-CL, CL-CH1, CH1-Fc, CL-Fc, CL-CH1-Fc, or CH1-CL-Fc region is linked to the carboxy terminus of the third polypeptide via one or more amino acid linker, and wherein the CH1, CL and Fc when present in the third polypeptide are linked to each other via one or more amino acid linker. In some aspects, the first polypeptide has a structure represented by VL1-L1-VL2-L2-VH2-L3-VH1-L4-CL, the second polypeptide has a structure represented by VL3, and the third polypeptide has a structure represented by VH3; optionally wherein the second and/or third polypeptide comprises at least one of an Fc region, a CL region, and a CH1 region at the carboxy terminus of the second and/or third polypeptide, or wherein the second and/or third polypeptide comprises a CH1-CL, CL-CH1, CH1-Fc, CL-Fc, CL-CH1-Fc, CH1-CL-Fc at the carboxy terminus of the second and/or third polypeptide, wherein the CH1-CL, CL-CH1, CH1-Fc, CL-Fc, CL-CH1-Fc, or CH1-CL-Fc region is linked to the carboxy terminus of the second and third polypeptide via one or more amino acid linker, and wherein the CH1, CL and Fe when present in the second and third polypeptide are linked to each other via one or more amino acid linker. In some aspects, the first polypeptide has a structure represented by VH1-L1-VH2-L2-VL2-L3-VL1-L4-CL, the second polypeptide has a structure represented by VL3, and the third polypeptide has a structure represented by VH3; optionally wherein the second and/or third polypeptide comprises at least one of an Fc region, a CL region, and a CH1 region at the carboxy terminus of the second and/or third polypeptide, or wherein the second and/or third polypeptide comprises a CH1-CL, CL-CH1, CH1-Fc, CL-Fc, CL-CH1-Fc, CH1-CL-Fc at the carboxy terminus of the second and/or third polypeptide. In some aspects, the first polypeptide has a structure represented by VH1-L1-VH2-L2-VL2-L3-VL1-L4-CL, the second polypeptide has a structure represented by VL3, and the third polypeptide has a structure represented by VH3; optionally wherein the second and/or third polypeptide comprises at least one of an Fc region, a CL region, and a CH1 region at the carboxy terminus of the second and/or third polypeptide, or wherein the second and/or third polypeptide comprises a CH1-CL, CL-CH1, CH1-Fc, CL-Fc, CL-CH1-Fe, CH1-CL-Fc at the carboxy terminus of the second and/or third polypeptide, wherein the CH1-CL, CL-CH1, CH1-Fc, CL-Fc, CL-CH1-Fc, or CH1-CL-Fc region is linked to the carboxy terminus of the second polypeptide via one or more amino acid linker, and wherein the CH1, CL and Fc when present in the second polypeptide are linked to each other via one or more amino acid linker. In some aspects, the first polypeptide has a structure represented by VH1-L1-VH2-L2-VL2-L3-VL1-L4-CL, the second polypeptide has a structure represented by VL3, and the third polypeptide has a structure represented by VH3; optionally wherein the second and/or third polypeptide comprises at least one of an Fc region, a CL region, and a CH1 region at the carboxy terminus of the second and/or third polypeptide, or wherein the second and/or third polypeptide comprises a CH1-CL, CL-CH1, CH1-Fc, CL-Fc, CL-CH1-Fc, CH1-CL-Fc at the carboxy terminus of the second and/or third polypeptide, wherein the CH1-CL, CL-CH1, CH1-Fc, CL-Fc, CL-CH1-Fc, or CH1-CL-Fc region is linked to the carboxy terminus of the third polypeptide via one or more amino acid linker, and wherein the CH1, CL and Fe when present in the third polypeptide are linked to each other via one or more amino acid linker. In some aspects, the first polypeptide has a structure represented by VH1-L1-VH2-L2-VL2-L3-VL1-L4-CL, the second polypeptide has a structure represented by VL3, and the third polypeptide has a structure represented by VH3; optionally wherein the second and/or third polypeptide comprises at least one of an Fc region, a CL region, and a CH1 region at the carboxy terminus of the second and/or third polypeptide, or wherein the second and/or third polypeptide comprises a CH1-CL, CL-CH1, CH1-Fc, CL-Fc, CL-CH1-Fc, CH1-CL-Fc at the carboxy terminus of the second and/or third polypeptide, wherein the CH1-CL, CL-CH1, CH1-Fc, CL-Fc, CL-CH1-Fc, or CH1-CL-Fc region is linked to the carboxy terminus of the second and third polypeptide via one or more amino acid linker, and wherein the CH1, CL and Fe when present in the second and third polypeptide are linked to each other via one or more amino acid linker. In some aspects, the first polypeptide has a structure represented by VL1-L1-VL2-L2-VH2-L3-VH1-L4-CH1-L5-CL, the second polypeptide has a structure represented by VL3, and the third polypeptide has a structure represented by VH3; optionally wherein the second and/or third polypeptide comprises at least one of an Fe region, a CL region, and a CH1 region at the carboxy terminus of the second and/or third polypeptide, or wherein the second and/or third polypeptide comprises a CH1-CL, CL-CH1, CH1-Fc, CL-Fc, CL-CH1-Fc, CH1-CL-Fc at the carboxy terminus of the second and/or third polypeptide. In some aspects, the first polypeptide has a structure represented by VL1-L1-VL2-L2-VH2-L3-VH1-L4-CH1-L5-CL, the second polypeptide has a structure represented by VL3, and the third polypeptide has a structure represented by VH3; optionally wherein the second and/or third polypeptide comprises at least one of an Fc region, a CL region, and a CH1 region at the carboxy terminus of the second and/or third polypeptide, or wherein the second and/or third polypeptide comprises a CH1-CL, CL-CH1, CH1-Fc, CL-Fc, CL-CH1-Fc, CH1-CL-Fc at the carboxy terminus of the second and/or third polypeptide, wherein the CH1-CL, CL-CH1, CH1-Fc, CL-Fc, CL-CH1-Fc, or CH1-CL-Fc region is linked to the carboxy terminus of the second polypeptide via one or more amino acid linker, and wherein the CH1, CL and Fc when present in the second polypeptide are linked to each other via one or more amino acid linker. In some aspects, the first polypeptide has a structure represented by VL1-L1-VL2-L2-VH2-L3-VH1-L4-CH1-L5-CL, the second polypeptide has a structure represented by VL3, and the third polypeptide has a structure represented by VH3; optionally wherein the second and/or third polypeptide comprises at least one of an Fc region, a CL region, and a CH1 region at the carboxy terminus of the second and/or third polypeptide, or wherein the second and/or third polypeptide comprises a CH1-CL, CL-CH1, CH1-Fc, CL-Fc, CL-CH1-Fc, CH1-CL-Fc at the carboxy terminus of the second and/or third polypeptide, wherein the CH1-CL, CL-CH1, CH1-Fc, CL-Fc, CL-CH1-Fc, or CH1-CL-Fc region is linked to the carboxy terminus of the third polypeptide via one or more amino acid linker, and wherein the CH1, CL and Fc when present in the third polypeptide are linked to each other via one or more amino acid linker. In some aspects, the first polypeptide has a structure represented by VL1-L1-VL2-L2-VH2-L3-VH1-L4-CH1-L5-CL, the second polypeptide has a structure represented by VL3, and the third polypeptide has a structure represented by VH3; optionally wherein the second and/or third polypeptide comprises at least one of an Fc region, a CL region, and a CH1 region at the carboxy terminus of the second and/or third polypeptide, or wherein the second and/or third polypeptide comprises a CH1-CL, CL-CH1, CH1-Fc, CL-Fc, CL-CH1-Fc, CH1-CL-Fc at the carboxy terminus of the second and/or third polypeptide, wherein the CH1-CL, CL-CH1, CH1-Fc, CL-Fc, CL-CH1-Fc, or CH1-CL-Fc region is linked to the carboxy terminus of the second and third polypeptide via one or more amino acid linker, and wherein the CH1, CL and Fc when present in the second and third polypeptide are linked to each other via one or more amino acid linker. In some aspects, the first polypeptide has a structure represented by VH1-L1-VH2-L2-VL2-L3-VL1-L4-CH1-L5-CL, the second polypeptide has a structure represented by VL3, and the third polypeptide has a structure represented by VH3; optionally wherein the second and/or third polypeptide comprises at least one of an Fc region, a CL region, and a CH1 region at the carboxy terminus of the second and/or third polypeptide, or wherein the second and/or third polypeptide comprises a CH1-CL, CL-CH1, CH1-Fc, CL-Fc, CL-CH1-Fc, CH1-CL-Fc at the carboxy terminus of the second and/or third polypeptide. In some aspects, the first polypeptide has a structure represented by VH1-L1-VH2-L2-VL2-L3-VL1-L4-CH1-L5-CL, the second polypeptide has a structure represented by VL3, and the third polypeptide has a structure represented by VH3; optionally wherein the second and/or third polypeptide comprises at least one of an Fc region, a CL region, and a CH1 region at the carboxy terminus of the second and/or third polypeptide, or wherein the second and/or third polypeptide comprises a CH1-CL, CL-CH1, CH1-Fc, CL-Fc, CL-CH1-Fc, CH1-CL-Fc at the carboxy terminus of the second and/or third polypeptide, wherein the CH1-CL, CL-CH1, CH1-Fc, CL-Fc, CL-CH1-Fc, or CH1-CL-Fc region is linked to the carboxy terminus of the second polypeptide via one or more amino acid linker, and wherein the CH1, CL and Fe when present in the second polypeptide are linked to each other via one or more amino acid linker. In some aspects, the first polypeptide has a structure represented by VH1-L1-VH2-L2-VL2-L3-VL1-L4-CH1-L5-CL, the second polypeptide has a structure represented by VL3, and the third polypeptide has a structure represented by VH3; optionally wherein the second and/or third polypeptide comprises at least one of an Fc region, a CL region, and a CH1 region at the carboxy terminus of the second and/or third polypeptide, or wherein the second and/or third polypeptide comprises a CH1-CL, CL-CH1, CH1-Fc, CL-Fc, CL-CH1-Fc, CH1-CL-Fc at the carboxy terminus of the second and/or third polypeptide, wherein the CH1-CL, CL-CH1, CH1-Fc, CL-Fc, CL-CH1-Fc, or CH1-CL-Fc region is linked to the carboxy terminus of the third polypeptide via one or more amino acid linker, and wherein the CH1, CL and Fc when present in the third polypeptide are linked to each other via one or more amino acid linker. In some aspects, the first polypeptide has a structure represented by VH1-L1-VH2-L2-VL2-L3-VL1-L4-CH1-L5-CL, the second polypeptide has a structure represented by VL3, and the third polypeptide has a structure represented by VH3; optionally wherein the second and/or third polypeptide comprises at least one of an Fc region, a CL region, and a CH1 region at the carboxy terminus of the second and/or third polypeptide, or wherein the second and/or third polypeptide comprises a CH1-CL, CL-CH1, CH1-Fe, CL-Fc, CL-CH1-Fc, CH1-CL-Fc at the carboxy terminus of the second and/or third polypeptide, wherein the CH1-CL, CL-CH1, CH1-Fc, CL-Fc, CL-CH1-Fc, or CH1-CL-Fc region is linked to the carboxy terminus of the second and third polypeptide via one or more amino acid linker, and wherein the CH1, CL and Fc when present in the second and third polypeptide are linked to each other via one or more amino acid linker. In some aspects, the first polypeptide has a structure represented by VL1-L1-VL2-L2-VH2-L3-VH1-L4-CL-L5-CH1, the second polypeptide has a structure represented by VL3, and the third polypeptide has a structure represented by VH3; optionally wherein the second and/or third polypeptide comprises at least one of an Fc region, a CL region, and a CH1 region at the carboxy terminus of the second and/or third polypeptide, or wherein the second and/or third polypeptide comprises a CH1-CL, CL-CH1, CH1-Fe, CL-Fc, CL-CH1-Fc, CH1-CL-Fc at the carboxy terminus of the second and/or third polypeptide. In some aspects, the first polypeptide has a structure represented by VL1-L1-VL2-L2-VH2-L3-VH1-L4-CL-L5-CH1, the second polypeptide has a structure represented by VL3, and the third polypeptide has a structure represented by VH3; optionally wherein the second and/or third polypeptide comprises at least one of an Fc region, a CL region, and a CH1 region at the carboxy terminus of the second and/or third polypeptide, or wherein the second and/or third polypeptide comprises a CH1-CL, CL-CH1, CH1-Fc, CL-Fc, CL-CH1-Fc, CH1-CL-Fc at the carboxy terminus of the second and/or third polypeptide, wherein the CH1-CL, CL-CH1, CH1-Fc, CL-Fc, CL-CH1-Fc, or CH1-CL-Fc region is linked to the carboxy terminus of the second polypeptide via one or more amino acid linker, and wherein the CH1, CL and Fc when present in the second polypeptide are linked to each other via one or more amino acid linker. In some aspects, the first polypeptide has a structure represented by VL1-L1-VL2-L2-VH2-L3-VH1-L4-CL-L5-CH1, the second polypeptide has a structure represented by VL3, and the third polypeptide has a structure represented by VH3; optionally wherein the second and/or third polypeptide comprises at least one of an Fc region, a CL region, and a CH1 region at the carboxy terminus of the second and/or third polypeptide, or wherein the second and/or third polypeptide comprises a CH1-CL, CL-CH1, CH1-Fe, CL-Fc, CL-CH1-Fc, CH1-CL-Fc at the carboxy terminus of the second and/or third polypeptide, wherein the CH1-CL, CL-CH1, CH1-Fc, CL-Fc, CL-CH1-Fc, or CH1-CL-Fc region is linked to the carboxy terminus of the third polypeptide via one or more amino acid linker, and wherein the CH1, CL and Fc when present in the third polypeptide are linked to each other via one or more amino acid linker. In some aspects, the first polypeptide has a structure represented by VL1-L1-VL2-L2-VH2-L3-VH1-L4-CL-L5-CH1, the second polypeptide has a structure represented by VL3, and the third polypeptide has a structure represented by VH3; optionally wherein the second and/or third polypeptide comprises at least one of an Fc region, a CL region, and a CH1 region at the carboxy terminus of the second and/or third polypeptide, or wherein the second and/or third polypeptide comprises a CH1-CL, CL-CH1, CH1-Fc, CL-Fe, CL-CH1-Fc, CH1-CL-Fc at the carboxy terminus of the second and/or third polypeptide, wherein the CH1-CL, CL-CH1, CH1-Fc, CL-Fc, CL-CH1-Fc, or CH1-CL-Fc region is linked to the carboxy terminus of the second and third polypeptide via one or more amino acid linker, and wherein the CH1, CL and Fc when present in the second and third polypeptide are linked to each other via one or more amino acid linker. In some aspects, the first polypeptide has a structure represented by VH1-L1-VH2-L2-VL2-L3-VL1-L4-CL-L5-CH1, the second polypeptide has a structure represented by VL3, and the third polypeptide has a structure represented by VH3; optionally wherein the second and/or third polypeptide comprises at least one of an Fc region, a CL region, and a CH1 region at the carboxy terminus of the second and/or third polypeptide, or wherein the second and/or third polypeptide comprises a CH1-CL, CL-CH1, CH1-Fe, CL-Fc, CL-CH1-Fc, CH1-CL-Fc at the carboxy terminus of the second and/or third polypeptide. In some aspects, the first polypeptide has a structure represented by VH1-L1-VH2-L2-VL2-L3-VL1-L4-CL-L5-CH1, the second polypeptide has a structure represented by VL3, and the third polypeptide has a structure represented by VH3; optionally wherein the second and/or third polypeptide comprises at least one of an Fc region, a CL region, and a CH1 region at the carboxy terminus of the second and/or third polypeptide, or wherein the second and/or third polypeptide comprises a CH1-CL, CL-CH1, CH1-Fc, CL-Fc, CL-CH1-Fc, CH1-CL-Fc at the carboxy terminus of the second and/or third polypeptide, wherein the CH1-CL, CL-CH1, CH1-Fc, CL-Fc, CL-CH1-Fc, or CH1-CL-Fc region is linked to the carboxy terminus of the second polypeptide via one or more amino acid linker, and wherein the CH1, CL and Fc when present in the second polypeptide are linked to each other via one or more amino acid linker. In some aspects, the first polypeptide has a structure represented by VH1-L1-VH2-L2-VL2-L3-VL1-L4-CL-L5-CH1, the second polypeptide has a structure represented by VL3, and the third polypeptide has a structure represented by VH3; optionally wherein the second and/or third polypeptide comprises at least one of an Fc region, a CL region, and a CH1 region at the carboxy terminus of the second and/or third polypeptide, or wherein the second and/or third polypeptide comprises a CH1-CL, CL-CH1, CH1-Fe, CL-Fc, CL-CH1-Fc, CH1-CL-Fc at the carboxy terminus of the second and/or third polypeptide, wherein the CH1-CL, CL-CH1, CH1-Fc, CL-Fc, CL-CH1-Fc, or CH1-CL-Fc region is linked to the carboxy terminus of the third polypeptide via one or more amino acid linker, and wherein the CH1, CL and Fc when present in the third polypeptide are linked to each other via one or more amino acid linker. In some aspects, the first polypeptide has a structure represented by VH1-L1-VH2-L2-VL2-L3-VL1-L4-CL-L5-CH1, the second polypeptide has a structure represented by VL3, and the third polypeptide has a structure represented by VH3; optionally wherein the second and/or third polypeptide comprises at least one of an Fe region, a CL region, and a CH1 region at the carboxy terminus of the second and/or third polypeptide, or wherein the second and/or third polypeptide comprises a CH1-CL, CL-CH1, CH1-Fc, CL-Fe, CL-CH1-Fc, CH1-CL-Fc at the carboxy terminus of the second and/or third polypeptide, wherein the CH1-CL, CL-CH1, CH1-Fc, CL-Fc, CL-CH1-Fc, or CH1-CL-Fc region is linked to the carboxy terminus of the second and third polypeptide via one or more amino acid linker, and wherein the CH1, CL and Fc when present in the second and third polypeptide are linked to each other via one or more amino acid linker. In some aspects, the first polypeptide has a structure represented by VL1-L1-VL2-L2-VH2-L3-VH1-L4-CH1-Fc, the second polypeptide has a structure represented by VL3, and the third polypeptide has a structure represented by VH3; optionally wherein the second and/or third polypeptide comprises at least one of an Fc region, a CL region, and a CH1 region at the carboxy terminus of the second and/or third polypeptide, or wherein the second and/or third polypeptide comprises a CH1-CL, CL-CH1, CH1-Fc, CL-Fc, CL-CH1-Fc, CH1-CL-Fc at the carboxy terminus of the second and/or third polypeptide. In some aspects, the first polypeptide has a structure represented by VL1-L1-VL2-L2-VH2-L3-VH1-L4-CH1-Fc, the second polypeptide has a structure represented by VL3, and the third polypeptide has a structure represented by VH3; optionally wherein the second and/or third polypeptide comprises at least one of an Fc region, a CL region, and a CH1 region at the carboxy terminus of the second and/or third polypeptide, or wherein the second and/or third polypeptide comprises a CH1-CL, CL-CH1, CH1-Fc, CL-Fc, CL-CH1-Fc, CH1-CL-Fc at the carboxy terminus of the second and/or third polypeptide, wherein the CH1-CL, CL-CH1, CH1-Fc, CL-Fc, CL-CH1-Fc, or CH1-CL-Fc region is linked to the carboxy terminus of the second polypeptide via one or more amino acid linker, and wherein the CH1, CL and Fc when present in the second polypeptide are linked to each other via one or more amino acid linker. In some aspects, the first polypeptide has a structure represented by VL1-L1-VL2-L2-VH2-L3-VH1-L4-CH1-Fc, the second polypeptide has a structure represented by VL3, and the third polypeptide has a structure represented by VH3; optionally wherein the second and/or third polypeptide comprises at least one of an Fc region, a CL region, and a CH1 region at the carboxy terminus of the second and/or third polypeptide, or wherein the second and/or third polypeptide comprises a CH1-CL, CL-CH1, CH1-Fc, CL-Fc, CL-CH1-Fc, CH1-CL-Fc at the carboxy terminus of the second and/or third polypeptide, wherein the CH1-CL, CL-CH1, CH1-Fc, CL-Fc, CL-CH1-Fc, or CH1-CL-Fc region is linked to the carboxy terminus of the third polypeptide via one or more amino acid linker, and wherein the CH1, CL and Fc when present in the third polypeptide are linked to each other via one or more amino acid linker. In some aspects, the first polypeptide has a structure represented by VL1-L1-VL2-L2-VH2-L3-VH1-L4-CH1-Fc, the second polypeptide has a structure represented by VL3, and the third polypeptide has a structure represented by VH3; optionally wherein the second and/or third polypeptide comprises at least one of an Fc region, a CL region, and a CH1 region at the carboxy terminus of the second and/or third polypeptide, or wherein the second and/or third polypeptide comprises a CH1-CL, CL-CH1, CH1-Fc, CL-Fc, CL-CH1-Fc, CH1-CL-Fc at the carboxy terminus of the second and/or third polypeptide, wherein the CH1-CL, CL-CH1, CH1-Fc, CL-Fc, CL-CH1-Fc, or CH1-CL-Fc region is linked to the carboxy terminus of the second and third polypeptide via one or more amino acid linker, and wherein the CH1, CL and Fc when present in the second and third polypeptide are linked to each other via one or more amino acid linker. In some aspects, the first polypeptide has a structure represented by VH1-L1-VH2-L2-VL2-L3-VL1-L4-CH1-Fc, the second polypeptide has a structure represented by VL3, and the third polypeptide has a structure represented by VH3; optionally wherein the second and/or third polypeptide comprises at least one of an Fc region, a CL region, and a CH1 region at the carboxy terminus of the second and/or third polypeptide, or wherein the second and/or third polypeptide comprises a CH1-CL, CL-CH1, CH1-Fc, CL-Fc, CL-CH1-Fc, CH1-CL-Fe at the carboxy terminus of the second and/or third polypeptide. In some aspects, the first polypeptide has a structure represented by VH1-L1-VH2-L2-VL2-L3-VL1-L4-CH1-Fc, the second polypeptide has a structure represented by VL3, and the third polypeptide has a structure represented by VH3; optionally wherein the second and/or third polypeptide comprises at least one of an Fc region, a CL region, and a CH1 region at the carboxy terminus of the second and/or third polypeptide, or wherein the second and/or third polypeptide comprises a CH1-CL, CL-CH1, CH1-Fc, CL-Fc, CL-CH1-Fc, CH1-CL-Fc at the carboxy terminus of the second and/or third polypeptide, wherein the CH1-CL, CL-CH1, CH1-Fc, CL-Fc, CL-CH1-Fc, or CH1-CL-Fc region is linked to the carboxy terminus of the second polypeptide via one or more amino acid linker, and wherein the CH1, CL and Fc when present in the second polypeptide are linked to each other via one or more amino acid linker. In some aspects, the first polypeptide has a structure represented by VH1-L1-VH2-L2-VL2-L3-VL1-L4-CH1-Fc, the second polypeptide has a structure represented by VL3, and the third polypeptide has a structure represented by VH3; optionally wherein the second and/or third polypeptide comprises at least one of an Fc region, a CL region, and a CH1 region at the carboxy terminus of the second and/or third polypeptide, or wherein the second and/or third polypeptide comprises a CH1-CL, CL-CH1, CH1-Fc, CL-Fc, CL-CH1-Fc, CH1-CL-Fc at the carboxy terminus of the second and/or third polypeptide, wherein the CH1-CL, CL-CH1, CH1-Fc, CL-Fc, CL-CH1-Fc, or CH1-CL-Fc region is linked to the carboxy terminus of the third polypeptide via one or more amino acid linker, and wherein the CH1, CL and Fc when present in the third polypeptide are linked to each other via one or more amino acid linker. In some aspects, the first polypeptide has a structure represented by VH1-L1-VH2-L2-VL2-L3-VL1-L4-CH1-Fc, the second polypeptide has a structure represented by VL3, and the third polypeptide has a structure represented by VH3; optionally wherein the second and/or third polypeptide comprises at least one of an Fc region, a CL region, and a CH1 region at the carboxy terminus of the second and/or third polypeptide, or wherein the second and/or third polypeptide comprises a CH1-CL, CL-CH1, CH1-Fc, CL-Fc, CL-CH1-Fc, CH1-CL-Fc at the carboxy terminus of the second and/or third polypeptide, wherein the CH1-CL, CL-CH1, CH1-Fc, CL-Fc, CL-CH1-Fc, or CH1-CL-Fc region is linked to the carboxy terminus of the second and third polypeptide via one or more amino acid linker, and wherein the CH1, CL and Fc when present in the second and third polypeptide are linked to each other via one or more amino acid linker. In some aspects, the first polypeptide has a structure represented by VL1-L1-VL2-L2-VH2-L3-VH1-L4-CL-Fc, the second polypeptide has a structure represented by VL3, and the third polypeptide has a structure represented by VH3; optionally wherein the second and/or third polypeptide comprises at least one of an Fc region, a CL region, and a CH1 region at the carboxy terminus of the second and/or third polypeptide, or wherein the second and/or third polypeptide comprises a CH1-CL, CL-CH1, CH1-Fc, CL-Fc, CL-CH1-Fc, CH1-CL-Fc at the carboxy terminus of the second and/or third polypeptide. In some aspects, the first polypeptide has a structure represented by VL1-L1-VL2-L2-VH2-L3-VH1-L4-CL-Fc, the second polypeptide has a structure represented by VL3, and the third polypeptide has a structure represented by VH3; optionally wherein the second and/or third polypeptide comprises at least one of an Fc region, a CL region, and a CH1 region at the carboxy terminus of the second and/or third polypeptide, or wherein the second and/or third polypeptide comprises a CH1-CL, CL-CH1, CH1-Fc, CL-Fc, CL-CH1-Fc, CH1-CL-Fc at the carboxy terminus of the second and/or third polypeptide, wherein the CH1-CL, CL-CH1, CH1-Fc, CL-Fc, CL-CH1-Fc, or CH1-CL-Fc region is linked to the carboxy terminus of the second polypeptide via one or more amino acid linker, and wherein the CH1, CL and Fe when present in the second polypeptide are linked to each other via one or more amino acid linker. In some aspects, the first polypeptide has a structure represented by VL1-L1-VL2-L2-VH2-L3-VH1-L4-CL-Fc, the second polypeptide has a structure represented by VL3, and the third polypeptide has a structure represented by VH3; optionally wherein the second and/or third polypeptide comprises at least one of an Fc region, a CL region, and a CH1 region at the carboxy terminus of the second and/or third polypeptide, or wherein the second and/or third polypeptide comprises a CH1-CL, CL-CH1, CH1-Fc, CL-Fc, CL-CH1-Fc, CH1-CL-Fc at the carboxy terminus of the second and/or third polypeptide, wherein the CH1-CL, CL-CH1, CH1-Fc, CL-Fc, CL-CH1-Fc, or CH1-CL-Fc region is linked to the carboxy terminus of the third polypeptide via one or more amino acid linker, and wherein the CH1, CL and Fc when present in the third polypeptide are linked to each other via one or more amino acid linker. In some aspects, the first polypeptide has a structure represented by VL1-L1-VL2-L2-VH2-L3-VH1-L4-CL-Fc, the second polypeptide has a structure represented by VL3, and the third polypeptide has a structure represented by VH3; optionally wherein the second and/or third polypeptide comprises at least one of an Fc region, a CL region, and a CH1 region at the carboxy terminus of the second and/or third polypeptide, or wherein the second and/or third polypeptide comprises a CH1-CL, CL-CH1, CH1-Fc, CL-Fc, CL-CH1-Fc, CH1-CL-Fc at the carboxy terminus of the second and/or third polypeptide, wherein the CH1-CL, CL-CH1, CH1-Fc, CL-Fc, CL-CH1-Fc, or CH1-CL-Fc region is linked to the carboxy terminus of the second and third polypeptide via one or more amino acid linker, and wherein the CH1, CL and Fc when present in the second and third polypeptide are linked to each other via one or more amino acid linker. In some aspects, the first polypeptide has a structure represented by VH1-L1-VH2-L2-VL2-L3-VL1-L4-CL-Fc, the second polypeptide has a structure represented by VL3, and the third polypeptide has a structure represented by VH3; optionally wherein the second and/or third polypeptide comprises at least one of an Fc region, a CL region, and a CH1 region at the carboxy terminus of the second and/or third polypeptide, or wherein the second and/or third polypeptide comprises a CH1-CL, CL-CH1, CH1-Fc, CL-Fc, CL-CH1-Fc, CH1-CL-Fc at the carboxy terminus of the second and/or third polypeptide. In some aspects, the first polypeptide has a structure represented by VH1-L1-VH2-L2-VL2-L3-VL1-L4-CL-Fc, the second polypeptide has a structure represented by VL3, and the third polypeptide has a structure represented by VH3; optionally wherein the second and/or third polypeptide comprises at least one of an Fc region, a CL region, and a CH1 region at the carboxy terminus of the second and/or third polypeptide, or wherein the second and/or third polypeptide comprises a CH1-CL, CL-CH1, CH1-Fc, CL-Fc, CL-CH1-Fc, CH1-CL-Fc at the carboxy terminus of the second and/or third polypeptide, wherein the CH1-CL, CL-CH1, CH1-Fc, CL-Fc, CL-CH1-Fc, or CH1-CL-Fc region is linked to the carboxy terminus of the second polypeptide via one or more amino acid linker, and wherein the CH1, CL and Fc when present in the second polypeptide are linked to each other via one or more amino acid linker. In some aspects, the first polypeptide has a structure represented by VH1-L1-VH2-L2-VL2-L3-VL1-L4-CL-Fc, the second polypeptide has a structure represented by VL3, and the third polypeptide has a structure represented by VH3; optionally wherein the second and/or third polypeptide comprises at least one of an Fc region, a CL region, and a CH1 region at the carboxy terminus of the second and/or third polypeptide, or wherein the second and/or third polypeptide comprises a CH1-CL, CL-CH1, CH1-Fc, CL-Fc, CL-CH1-Fc, CH1-CL-Fc at the carboxy terminus of the second and/or third polypeptide, wherein the CH1-CL, CL-CH1, CH1-Fc, CL-Fc, CL-CH1-Fc, or CH1-CL-Fc region is linked to the carboxy terminus of the third polypeptide via one or more amino acid linker, and wherein the CH1, CL and Fc when present in the third polypeptide are linked to each other via one or more amino acid linker. In some aspects, the first polypeptide has a structure represented by VH1-L1-VH2-L2-VL2-L3-VL1-L4-CL-Fc, the second polypeptide has a structure represented by VL3, and the third polypeptide has a structure represented by VH3; optionally wherein the second and/or third polypeptide comprises at least one of an Fc region, a CL region, and a CH1 region at the carboxy terminus of the second and/or third polypeptide, or wherein the second and/or third polypeptide comprises a CH1-CL, CL-CH1, CH1-Fc, CL-Fc, CL-CH1-Fc, CH1-CL-Fc at the carboxy terminus of the second and/or third polypeptide, wherein the CH1-CL, CL-CH1, CH1-Fc, CL-Fc, CL-CH1-Fc, or CH1-CL-Fc region is linked to the carboxy terminus of the second and third polypeptide via one or more amino acid linker, and wherein the CH1, CL and Fc when present in the second and third polypeptide are linked to each other via one or more amino acid linker. In some aspects, the first polypeptide has a structure represented by VL1-L1-VL2-L2-VH2-L3-VH1-L4-CH1-L5-CL-Fc, the second polypeptide has a structure represented by VL3, and the third polypeptide has a structure represented by VH3; optionally wherein the second and/or third polypeptide comprises at least one of an Fc region, a CL region, and a CH1 region at the carboxy terminus of the second and/or third polypeptide, or wherein the second and/or third polypeptide comprises a CH1-CL, CL-CH1, CH1-Fc, CL-Fc, CL-CH1-Fc, CH1-CL-Fc at the carboxy terminus of the second and/or third polypeptide. In some aspects, the first polypeptide has a structure represented by VL1-L1-VL2-L2-VH2-L3-VH1-L4-CH1-L5-CL-Fc, the second polypeptide has a structure represented by VL3, and the third polypeptide has a structure represented by VH3; optionally wherein the second and/or third polypeptide comprises at least one of an Fc region, a CL region, and a CH1 region at the carboxy terminus of the second and/or third polypeptide, or wherein the second and/or third polypeptide comprises a CH1-CL, CL-CH1, CH1-Fc, CL-Fc, CL-CH1-Fc, CH1-CL-Fc at the carboxy terminus of the second and/or third polypeptide, wherein the CH1-CL, CL-CH1, CH1-Fc, CL-Fc, CL-CH1-Fc, or CH1-CL-Fc region is linked to the carboxy terminus of the second polypeptide via one or more amino acid linker, and wherein the CH1, CL and Fc when present in the second polypeptide are linked to each other via one or more amino acid linker. In some aspects, the first polypeptide has a structure represented by VL1-L1-VL2-L2-VH2-L3-VH1-L4-CH1-L5-CL-Fc, the second polypeptide has a structure represented by VL3, and the third polypeptide has a structure represented by VH3; optionally wherein the second and/or third polypeptide comprises at least one of an Fc region, a CL region, and a CH1 region at the carboxy terminus of the second and/or third polypeptide, or wherein the second and/or third polypeptide comprises a CH1-CL, CL-CH1, CH1-Fc, CL-Fc, CL-CH1-Fc, CH1-CL-Fc at the carboxy terminus of the second and/or third polypeptide, wherein the CH1-CL, CL-CH1, CH1-Fc, CL-Fc, CL-CH1-Fc, or CH1-CL-Fc region is linked to the carboxy terminus of the third polypeptide via one or more amino acid linker, and wherein the CH1, CL and Fc when present in the third polypeptide are linked to each other via one or more amino acid linker. In some aspects, the first polypeptide has a structure represented by VL1-L1-VL2-L2-VH2-L3-VH1-L4-CH1-L5-CL-Fc, the second polypeptide has a structure represented by VL3, and the third polypeptide has a structure represented by VH3; optionally wherein the second and/or third polypeptide comprises at least one of an Fc region, a CL region, and a CH1 region at the carboxy terminus of the second and/or third polypeptide, or wherein the second and/or third polypeptide comprises a CH1-CL, CL-CH1, CH1-Fe, CL-Fc, CL-CH1-Fc, CH1-CL-Fc at the carboxy terminus of the second and/or third polypeptide, wherein the CH1-CL, CL-CH1, CH1-Fc, CL-Fc, CL-CH1-Fc, or CH1-CL-Fc region is linked to the carboxy terminus of the second and third polypeptide via one or more amino acid linker, and wherein the CH1, CL and Fc when present in the second and third polypeptide are linked to each other via one or more amino acid linker. In some aspects, the first polypeptide has a structure represented by VH1-L1-VH2-L2-VL2-L3-VL1-L4-CH1-L5-CL-Fc, the second polypeptide has a structure represented by VL3, and the third polypeptide has a structure represented by VH3; optionally wherein the second and/or third polypeptide comprises at least one of an Fc region, a CL region, and a CH1 region at the carboxy terminus of the second and/or third polypeptide, or wherein the second and/or third polypeptide comprises a CH1-CL, CL-CH1, CH1-Fe, CL-Fc, CL-CH1-Fc, CH1-CL-Fc at the carboxy terminus of the second and/or third polypeptide. In some aspects, the first polypeptide has a structure represented by VH1-L1-VH2-L2-VL2-L3-VL1-L4-CH1-L5-CL-Fc, the second polypeptide has a structure represented by VL3, and the third polypeptide has a structure represented by VH3; optionally wherein the second and/or third polypeptide comprises at least one of an Fc region, a CL region, and a CH1 region at the carboxy terminus of the second and/or third polypeptide, or wherein the second and/or third polypeptide comprises a CH1-CL, CL-CH1, CH1-Fc, CL-Fc, CL-CH1-Fc, CH1-CL-Fc at the carboxy terminus of the second and/or third polypeptide, wherein the CH1-CL, CL-CH1, CH1-Fc, CL-Fc, CL-CH1-Fc, or CH1-CL-Fc region is linked to the carboxy terminus of the second polypeptide via one or more amino acid linker, and wherein the CH1, CL and Fe when present in the second polypeptide are linked to each other via one or more amino acid linker. In some aspects, the first polypeptide has a structure represented by VH1-L1-VH2-L2-VL2-L3-VL1-L4-CH1-L5-CL-Fc, the second polypeptide has a structure represented by VL3, and the third polypeptide has a structure represented by VH3; optionally wherein the second and/or third polypeptide comprises at least one of an Fc region, a CL region, and a CH1 region at the carboxy terminus of the second and/or third polypeptide, or wherein the second and/or third polypeptide comprises a CH1-CL, CL-CH1, CH1-Fc, CL-Fc, CL-CH1-Fc, CH1-CL-Fc at the carboxy terminus of the second and/or third polypeptide, wherein the CH1-CL, CL-CH1, CH1-Fc, CL-Fc, CL-CH1-Fc, or CH1-CL-Fc region is linked to the carboxy terminus of the third polypeptide via one or more amino acid linker, and wherein the CH1, CL and Fc when present in the third polypeptide are linked to each other via one or more amino acid linker. In some aspects, the first polypeptide has a structure represented by VH1-L1-VH2-L2-VL2-L3-VL1-L4-CH1-L5-CL-Fc, the second polypeptide has a structure represented by VL3, and the third polypeptide has a structure represented by VH3; optionally wherein the second and/or third polypeptide comprises at least one of an Fc region, a CL region, and a CH1 region at the carboxy terminus of the second and/or third polypeptide, or wherein the second and/or third polypeptide comprises a CH1-CL, CL-CH1, CH1-Fe, CL-Fc, CL-CH1-Fc, CH1-CL-Fc at the carboxy terminus of the second and/or third polypeptide, wherein the CH1-CL, CL-CH1, CH1-Fc, CL-Fc, CL-CH1-Fc, or CH1-CL-Fc region is linked to the carboxy terminus of the second and third polypeptide via one or more amino acid linker, and wherein the CH1, CL and Fc when present in the second and third polypeptide are linked to each other via one or more amino acid linker. In some aspects, the first polypeptide has a structure represented by VL1-L1-VL2-L2-VH2-L3-VH1-L4-CL-L5-CH1-Fc, the second polypeptide has a structure represented by VL3, and the third polypeptide has a structure represented by VH3; optionally wherein the second and/or third polypeptide comprises at least one of an Fc region, a CL region, and a CH1 region at the carboxy terminus of the second and/or third polypeptide, or wherein the second and/or third polypeptide comprises a CH1-CL, CL-CH1, CH1-Fe, CL-Fc, CL-CH1-Fc, CH1-CL-Fc at the carboxy terminus of the second and/or third polypeptide. In some aspects, the first polypeptide has a structure represented by VL1-L1-VL2-L2-VH2-L3-VH1-L4-CL-L5-CH1-Fc, the second polypeptide has a structure represented by VL3, and the third polypeptide has a structure represented by VH3; optionally wherein the second and/or third polypeptide comprises at least one of an Fc region, a CL region, and a CH1 region at the carboxy terminus of the second and/or third polypeptide, or wherein the second and/or third polypeptide comprises a CH1-CL, CL-CH1, CH1-Fc, CL-Fc, CL-CH1-Fc, CH1-CL-Fc at the carboxy terminus of the second and/or third polypeptide, wherein the CH1-CL, CL-CH1, CH1-Fc, CL-Fc, CL-CH1-Fc, or CH1-CL-Fc region is linked to the carboxy terminus of the second polypeptide via one or more amino acid linker, and wherein the CH1, CL and Fe when present in the second polypeptide are linked to each other via one or more amino acid linker. In some aspects, the first polypeptide has a structure represented by VL1-L1-VL2-L2-VH2-L3-VH1-L4-CL-L5-CH1-Fc, the second polypeptide has a structure represented by VL3, and the third polypeptide has a structure represented by VH3; optionally wherein the second and/or third polypeptide comprises at least one of an Fc region, a CL region, and a CH1 region at the carboxy terminus of the second and/or third polypeptide, or wherein the second and/or third polypeptide comprises a CH1-CL, CL-CH1, CH1-Fc, CL-Fc, CL-CH1-Fc, CH1-CL-Fc at the carboxy terminus of the second and/or third polypeptide, wherein the CH1-CL, CL-CH1, CH1-Fc, CL-Fc, CL-CH1-Fc, or CH1-CL-Fc region is linked to the carboxy terminus of the third polypeptide via one or more amino acid linker, and wherein the CH1, CL and Fc when present in the third polypeptide are linked to each other via one or more amino acid linker. In some aspects, the first polypeptide has a structure represented by VL1-L1-VL2-L2-VH2-L3-VH1-L4-CL-L5-CH1-Fc, the second polypeptide has a structure represented by VL3, and the third polypeptide has a structure represented by VH3; optionally wherein the second and/or third polypeptide comprises at least one of an Fc region, a CL region, and a CH1 region at the carboxy terminus of the second and/or third polypeptide, or wherein the second and/or third polypeptide comprises a CH1-CL, CL-CH1, CH1-Fc, CL-Fc, CL-CH1-Fc, CH1-CL-Fc at the carboxy terminus of the second and/or third polypeptide, wherein the CH1-CL, CL-CH1, CH1-Fc, CL-Fc, CL-CH1-Fc, or CH1-CL-Fc region is linked to the carboxy terminus of the second and third polypeptide via one or more amino acid linker, and wherein the CH1, CL and Fc when present in the second and third polypeptide are linked to each other via one or more amino acid linker. In some aspects, the first polypeptide has a structure represented by VH1-L1-VH2-L2-VL2-L3-VL1-L4-CL-L5-CH1-Fc, the second polypeptide has a structure represented by VL3, and the third polypeptide has a structure represented by VH3; optionally wherein the second and/or third polypeptide comprises at least one of an Fc region, a CL region, and a CH1 region at the carboxy terminus of the second and/or third polypeptide, or wherein the second and/or third polypeptide comprises a CH1-CL, CL-CH1, CH1-Fc, CL-Fc, CL-CH1-Fc, CH1-CL-Fc at the carboxy terminus of the second and/or third polypeptide. In some aspects, the first polypeptide has a structure represented by VH1-L1-VH2-L2-VL2-L3-VL1-L4-CL-L5-CH1-Fc, the second polypeptide has a structure represented by VL3, and the third polypeptide has a structure represented by VH3; optionally wherein the second and/or third polypeptide comprises at least one of an Fc region, a CL region, and a CH1 region at the carboxy terminus of the second and/or third polypeptide, or wherein the second and/or third polypeptide comprises a CH1-CL, CL-CH1, CH1-Fc, CL-Fc, CL-CH1-Fc, CH1-CL-Fc at the carboxy terminus of the second and/or third polypeptide, wherein the CH1-CL, CL-CH1, CH1-Fc, CL-Fc, CL-CH1-Fc, or CH1-CL-Fc region is linked to the carboxy terminus of the second polypeptide via one or more amino acid linker, and wherein the CH1, CL and Fe when present in the second polypeptide are linked to each other via one or more amino acid linker. In some aspects, the first polypeptide has a structure represented by VH1-L1-VH2-L2-VL2-L3-VL1-L4-CL-L5-CH1-Fc, the second polypeptide has a structure represented by VL3, and the third polypeptide has a structure represented by VH3; optionally wherein the second and/or third polypeptide comprises at least one of an Fc region, a CL region, and a CH1 region at the carboxy terminus of the second and/or third polypeptide, or wherein the second and/or third polypeptide comprises a CH1-CL, CL-CH1, CH1-Fc, CL-Fc, CL-CH1-Fc, CH1-CL-Fc at the carboxy terminus of the second and/or third polypeptide, wherein the CH1-CL, CL-CH1, CH1-Fc, CL-Fc, CL-CH1-Fc, or CH1-CL-Fc region is linked to the carboxy terminus of the third polypeptide via one or more amino acid linker, and wherein the CH1, CL and Fc when present in the third polypeptide are linked to each other via one or more amino acid linker. In some aspects, the first polypeptide has a structure represented by VH1-L1-VH2-L2-VL2-L3-VL1-L4-CL-L5-CH1-Fc, the second polypeptide has a structure represented by VL3, and the third polypeptide has a structure represented by VH3; optionally wherein the second and/or third polypeptide comprises at least one of an Fc region, a CL region, and a CH1 region at the carboxy terminus of the second and/or third polypeptide, or wherein the second and/or third polypeptide comprises a CH1-CL, CL-CH1, CH1-Fe, CL-Fc, CL-CH1-Fc, CH1-CL-Fc at the carboxy terminus of the second and/or third polypeptide, wherein the CH1-CL, CL-CH1, CH1-Fc, CL-Fc, CL-CH1-Fc, or CH1-CL-Fc region is linked to the carboxy terminus of the second and third polypeptide via one or more amino acid linker, and wherein the CH1, CL and Fc when present in the second and third polypeptide are linked to each other via one or more amino acid linker. In some aspects, the first polypeptide has a structure represented by VL1-L1-VL2-L2-VH2-L3-VH1-L4-CH1-L5-Fc, the second polypeptide has a structure represented by VL3, and the third polypeptide has a structure represented by VH3; optionally wherein the second and/or third polypeptide comprises at least one of an Fc region, a CL region, and a CH1 region at the carboxy terminus of the second and/or third polypeptide, or wherein the second and/or third polypeptide comprises a CH1-CL, CL-CH1, CH1-Fe, CL-Fc, CL-CH1-Fc, CH1-CL-Fc at the carboxy terminus of the second and/or third polypeptide. In some aspects, the first polypeptide has a structure represented by VL1-L1-VL2-L2-VH2-L3-VH1-L4-CH1-L5-Fc, the second polypeptide has a structure represented by VL3, and the third polypeptide has a structure represented by VH3; optionally wherein the second and/or third polypeptide comprises at least one of an Fc region, a CL region, and a CH1 region at the carboxy terminus of the second and/or third polypeptide, or wherein the second and/or third polypeptide comprises a CH1-CL, CL-CH1, CH1-Fc, CL-Fc, CL-CH1-Fc, CH1-CL-Fc at the carboxy terminus of the second and/or third polypeptide, wherein the CH1-CL, CL-CH1, CH1-Fc, CL-Fc, CL-CH1-Fc, or CH1-CL-Fc region is linked to the carboxy terminus of the second polypeptide via one or more amino acid linker, and wherein the CH1, CL and Fc when present in the second polypeptide are linked to each other via one or more amino acid linker. In some aspects, the first polypeptide has a structure represented by VL1-L1-VL2-L2-VH2-L3-VH1-L4-CH1-L5-Fc, the second polypeptide has a structure represented by VL3, and the third polypeptide has a structure represented by VH3; optionally wherein the second and/or third polypeptide comprises at least one of an Fe region, a CL region, and a CH1 region at the carboxy terminus of the second and/or third polypeptide, or wherein the second and/or third polypeptide comprises a CH1-CL, CL-CH1, CH1-Fe, CL-Fc, CL-CH1-Fc, CH1-CL-Fc at the carboxy terminus of the second and/or third polypeptide, wherein the CH1-CL, CL-CH1, CH1-Fc, CL-Fc, CL-CH1-Fc, or CH1-CL-Fc region is linked to the carboxy terminus of the third polypeptide via one or more amino acid linker, and wherein the CH1, CL and Fc when present in the third polypeptide are linked to each other via one or more amino acid linker. In some aspects, the first polypeptide has a structure represented by VL1-L1-VL2-L2-VH2-L3-VH1-L4-CH1-L5-Fc, the second polypeptide has a structure represented by VL3, and the third polypeptide has a structure represented by VH3; optionally wherein the second and/or third polypeptide comprises at least one of an Fc region, a CL region, and a CH1 region at the carboxy terminus of the second and/or third polypeptide, or wherein the second and/or third polypeptide comprises a CH1-CL, CL-CH1, CH1-Fc, CL-Fe, CL-CH1-Fc, CH1-CL-Fc at the carboxy terminus of the second and/or third polypeptide, wherein the CH1-CL, CL-CH1, CH1-Fc, CL-Fc, CL-CH1-Fc, or CH1-CL-Fc region is linked to the carboxy terminus of the second and third polypeptide via one or more amino acid linker, and wherein the CH1, CL and Fc when present in the second and third polypeptide are linked to each other via one or more amino acid linker. In some aspects, the first polypeptide has a structure represented by VH1-L1-VH2-L2-VL2-L3-VL1-L4-CH1-L5-Fc, the second polypeptide has a structure represented by VL3, and the third polypeptide has a structure represented by VH3; optionally wherein the second and/or third polypeptide comprises at least one of an Fc region, a CL region, and a CH1 region at the carboxy terminus of the second and/or third polypeptide, or wherein the second and/or third polypeptide comprises a CH1-CL, CL-CH1, CH1-Fe, CL-Fc, CL-CH1-Fc, CH1-CL-Fc at the carboxy terminus of the second and/or third polypeptide. In some aspects, the first polypeptide has a structure represented by VH1-L1-VH2-L2-VL2-L3-VL1-L4-CH1-L5-Fc, the second polypeptide has a structure represented by VL3, and the third polypeptide has a structure represented by VH3; optionally wherein the second and/or third polypeptide comprises at least one of an Fc region, a CL region, and a CH1 region at the carboxy terminus of the second and/or third polypeptide, or wherein the second and/or third polypeptide comprises a CH1-CL, CL-CH1, CH1-Fc, CL-Fc, CL-CH1-Fc, CH1-CL-Fc at the carboxy terminus of the second and/or third polypeptide, wherein the CH1-CL, CL-CH1, CH1-Fc, CL-Fc, CL-CH1-Fc, or CH1-CL-Fc region is linked to the carboxy terminus of the second polypeptide via one or more amino acid linker, and wherein the CH1, CL and Fc when present in the second polypeptide are linked to each other via one or more amino acid linker. In some aspects, the first polypeptide has a structure represented by VH1-L1-VH2-L2-VL2-L3-VL1-L4-CH1-L5-Fc, the second polypeptide has a structure represented by VL3, and the third polypeptide has a structure represented by VH3; optionally wherein the second and/or third polypeptide comprises at least one of an Fc region, a CL region, and a CH1 region at the carboxy terminus of the second and/or third polypeptide, or wherein the second and/or third polypeptide comprises a CH1-CL, CL-CH1, CH1-Fe, CL-Fc, CL-CH1-Fc, CH1-CL-Fc at the carboxy terminus of the second and/or third polypeptide, wherein the CH1-CL, CL-CH1, CH1-Fc, CL-Fc, CL-CH1-Fc, or CH1-CL-Fc region is linked to the carboxy terminus of the third polypeptide via one or more amino acid linker, and wherein the CH1, CL and Fc when present in the third polypeptide are linked to each other via one or more amino acid linker. In some aspects, the first polypeptide has a structure represented by VH1-L1-VH2-L2-VL2-L3-VL1-L4-CH1-L5-Fc, the second polypeptide has a structure represented by VL3, and the third polypeptide has a structure represented by VH3; optionally wherein the second and/or third polypeptide comprises at least one of an Fc region, a CL region, and a CH1 region at the carboxy terminus of the second and/or third polypeptide, or wherein the second and/or third polypeptide comprises a CH1-CL, CL-CH1, CH1-Fc, CL-Fc, CL-CH1-Fc, CH1-CL-Fc at the carboxy terminus of the second and/or third polypeptide, wherein the CH1-CL, CL-CH1, CH1-Fc, CL-Fc, CL-CH1-Fc, or CH1-CL-Fc region is linked to the carboxy terminus of the second and third polypeptide via one or more amino acid linker, and wherein the CH1, CL and Fc when present in the second and third polypeptide are linked to each other via one or more amino acid linker. In some aspects, the first polypeptide has a structure represented by VL1-L1-VL2-L2-VH2-L3-VH1-L4-CL-L5-Fc, the second polypeptide has a structure represented by VL3, and the third polypeptide has a structure represented by VH3; optionally wherein the second and/or third polypeptide comprises at least one of an Fc region, a CL region, and a CH1 region at the carboxy terminus of the second and/or third polypeptide, or wherein the second and/or third polypeptide comprises a CH1-CL, CL-CH1, CH1-Fc, CL-Fc, CL-CH1-Fc, CH1-CL-Fc at the carboxy terminus of the second and/or third polypeptide. In some aspects, the first polypeptide has a structure represented by VL1-L1-VL2-L2-VH2-L3-VH1-L4-CL-L5-Fc, the second polypeptide has a structure represented by VL3, and the third polypeptide has a structure represented by VH3; optionally wherein the second and/or third polypeptide comprises at least one of an Fc region, a CL region, and a CH1 region at the carboxy terminus of the second and/or third polypeptide, or wherein the second and/or third polypeptide comprises a CH1-CL, CL-CH1, CH1-Fc, CL-Fc, CL-CH1-Fc, CH1-CL-Fc at the carboxy terminus of the second and/or third polypeptide, wherein the CH1-CL, CL-CH1, CH1-Fc, CL-Fc, CL-CH1-Fc, or CH1-CL-Fc region is linked to the carboxy terminus of the second polypeptide via one or more amino acid linker, and wherein the CH1, CL and Fc when present in the second polypeptide are linked to each other via one or more amino acid linker. In some aspects, the first polypeptide has a structure represented by VL1-L1-VL2-L2-VH2-L3-VH1-L4-CL-L5-Fc, the second polypeptide has a structure represented by VL3, and the third polypeptide has a structure represented by VH3; optionally wherein the second and/or third polypeptide comprises at least one of an Fc region, a CL region, and a CH1 region at the carboxy terminus of the second and/or third polypeptide, or wherein the second and/or third polypeptide comprises a CH1-CL, CL-CH1, CH1-Fc, CL-Fc, CL-CH1-Fc, CH1-CL-Fc at the carboxy terminus of the second and/or third polypeptide, wherein the CH1-CL, CL-CH1, CH1-Fc, CL-Fc, CL-CH1-Fc, or CH1-CL-Fc region is linked to the carboxy terminus of the third polypeptide via one or more amino acid linker, and wherein the CH1, CL and Fc when present in the third polypeptide are linked to each other via one or more amino acid linker. In some aspects, the first polypeptide has a structure represented by VL1-L1-VL2-L2-VH2-L3-VH1-L4-CL-L5-Fc, the second polypeptide has a structure represented by VL3, and the third polypeptide has a structure represented by VH3; optionally wherein the second and/or third polypeptide comprises at least one of an Fc region, a CL region, and a CH1 region at the carboxy terminus of the second and/or third polypeptide, or wherein the second and/or third polypeptide comprises a CH1-CL, CL-CH1, CH1-Fc, CL-Fc, CL-CH1-Fc, CH1-CL-Fc at the carboxy terminus of the second and/or third polypeptide, wherein the CH1-CL, CL-CH1, CH1-Fc, CL-Fc, CL-CH1-Fc, or CH1-CL-Fc region is linked to the carboxy terminus of the second and third polypeptide via one or more amino acid linker, and wherein the CH1, CL and Fc when present in the second and third polypeptide are linked to each other via one or more amino acid linker. In some aspects, the first polypeptide has a structure represented by VH1-L1-VH2-L2-VL2-L3-VL1-L4-CL-L5-Fc, the second polypeptide has a structure represented by VL3, and the third polypeptide has a structure represented by VH3; optionally wherein the second and/or third polypeptide comprises at least one of an Fc region, a CL region, and a CH1 region at the carboxy terminus of the second and/or third polypeptide, or wherein the second and/or third polypeptide comprises a CH1-CL, CL-CH1, CH1-Fe, CL-Fc, CL-CH1-Fc, CH1-CL-Fc at the carboxy terminus of the second and/or third polypeptide. In some aspects, the first polypeptide has a structure represented by VH1-L1-VH2-L2-VL2-L3-VL1-L4-CL-L5-Fc, the second polypeptide has a structure represented by VL3, and the third polypeptide has a structure represented by VH3; optionally wherein the second and/or third polypeptide comprises at least one of an Fc region, a CL region, and a CH1 region at the carboxy terminus of the second and/or third polypeptide, or wherein the second and/or third polypeptide comprises a CH1-CL, CL-CH1, CH1-Fc, CL-Fc, CL-CH1-Fc, CH1-CL-Fc at the carboxy terminus of the second and/or third polypeptide, wherein the CH1-CL, CL-CH1, CH1-Fc, CL-Fc, CL-CH1-Fc, or CH1-CL-Fc region is linked to the carboxy terminus of the second polypeptide via one or more amino acid linker, and wherein the CH1, CL and Fc when present in the second polypeptide are linked to each other via one or more amino acid linker. In some aspects, the first polypeptide has a structure represented by VH1-L1-VH2-L2-VL2-L3-VL1-L4-CL-L5-Fc, the second polypeptide has a structure represented by VL3, and the third polypeptide has a structure represented by VH3; optionally wherein the second and/or third polypeptide comprises at least one of an Fc region, a CL region, and a CH1 region at the carboxy terminus of the second and/or third polypeptide, or wherein the second and/or third polypeptide comprises a CH1-CL, CL-CH1, CH1-Fc, CL-Fc, CL-CH1-Fc, CH1-CL-Fc at the carboxy terminus of the second and/or third polypeptide, wherein the CH1-CL, CL-CH1, CH1-Fc, CL-Fc, CL-CH1-Fc, or CH1-CL-Fc region is linked to the carboxy terminus of the third polypeptide via one or more amino acid linker, and wherein the CH1, CL and Fc when present in the third polypeptide are linked to each other via one or more amino acid linker. In some aspects, the first polypeptide has a structure represented by VH1-L1-VH2-L2-VL2-L3-VL1-L4-CL-L5-Fc, the second polypeptide has a structure represented by VL3, and the third polypeptide has a structure represented by VH3; optionally wherein the second and/or third polypeptide comprises at least one of an Fc region, a CL region, and a CH1 region at the carboxy terminus of the second and/or third polypeptide, or wherein the second and/or third polypeptide comprises a CH1-CL, CL-CH1, CH1-Fc, CL-Fc, CL-CH1-Fc, CH1-CL-Fc at the carboxy terminus of the second and/or third polypeptide, wherein the CH1-CL, CL-CH1, CH1-Fc, CL-Fc, CL-CH1-Fc, or CH1-CL-Fc region is linked to the carboxy terminus of the second and third polypeptide via one or more amino acid linker, and wherein the CH1, CL and Fc when present in the second and third polypeptide are linked to each other via one or more amino acid linker. In some aspects, the first polypeptide has a structure represented by VL1-L1-VL2-L2-VH2-L3-VH1-L4-CH1-L5-CL-L6-Fc, the second polypeptide has a structure represented by VL3, and the third polypeptide has a structure represented by VH3; optionally wherein the second and/or third polypeptide comprises at least one of an Fc region, a CL region, and a CH1 region at the carboxy terminus of the second and/or third polypeptide, or wherein the second and/or third polypeptide comprises a CH1-CL, CL-CH1, CH1-Fc, CL-Fc, CL-CH1-Fc, CH1-CL-Fc at the carboxy terminus of the second and/or third polypeptide. In some aspects, the first polypeptide has a structure represented by VL1-L1-VL2-L2-VH2-L3-VH1-L4-CH1-L5-CL-L6-Fc, the second polypeptide has a structure represented by VL3, and the third polypeptide has a structure represented by VH3; optionally wherein the second and/or third polypeptide comprises at least one of an Fc region, a CL region, and a CH1 region at the carboxy terminus of the second and/or third polypeptide, or wherein the second and/or third polypeptide comprises a CH1-CL, CL-CH1, CH1-Fc, CL-Fc, CL-CH1-Fc, CH1-CL-Fc at the carboxy terminus of the second and/or third polypeptide, wherein the CH1-CL, CL-CH1, CH1-Fc, CL-Fc, CL-CH1-Fc, or CH1-CL-Fc region is linked to the carboxy terminus of the second polypeptide via one or more amino acid linker, and wherein the CH1, CL and Fe when present in the second polypeptide are linked to each other via one or more amino acid linker. In some aspects, the first polypeptide has a structure represented by VL1-L1-VL2-L2-VH2-L3-VH1-L4-CH1-L5-CL-L6-Fc, the second polypeptide has a structure represented by VL3, and the third polypeptide has a structure represented by VH3; optionally wherein the second and/or third polypeptide comprises at least one of an Fc region, a CL region, and a CH1 region at the carboxy terminus of the second and/or third polypeptide, or wherein the second and/or third polypeptide comprises a CH1-CL, CL-CH1, CH1-Fc, CL-Fc, CL-CH1-Fc, CH1-CL-Fc at the carboxy terminus of the second and/or third polypeptide, wherein the CH1-CL, CL-CH1, CH1-Fc, CL-Fc, CL-CH1-Fc, or CH1-CL-Fc region is linked to the carboxy terminus of the third polypeptide via one or more amino acid linker, and wherein the CH1, CL and Fc when present in the third polypeptide are linked to each other via one or more amino acid linker. In some aspects, the first polypeptide has a structure represented by VL1-L1-VL2-L2-VH2-L3-VH1-L4-CH1-L5-CL-L6-Fc, the second polypeptide has a structure represented by VL3, and the third polypeptide has a structure represented by VH3; optionally wherein the second and/or third polypeptide comprises at least one of an Fc region, a CL region, and a CH1 region at the carboxy terminus of the second and/or third polypeptide, or wherein the second and/or third polypeptide comprises a CH1-CL, CL-CH1, CH1-Fc, CL-Fc, CL-CH1-Fc, CH1-CL-Fc at the carboxy terminus of the second and/or third polypeptide, wherein the CH1-CL, CL-CH1, CH1-Fc, CL-Fc, CL-CH1-Fc, or CH1-CL-Fc region is linked to the carboxy terminus of the second and third polypeptide via one or more amino acid linker, and wherein the CH1, CL and Fc when present in the second and third polypeptide are linked to each other via one or more amino acid linker. In some aspects, the first polypeptide has a structure represented by VH1-L1-VH2-L2-VL2-L3-VL1-L4-CH1-L5-CL-L6-Fc, the second polypeptide has a structure represented by VL3, and the third polypeptide has a structure represented by VH3; optionally wherein the second and/or third polypeptide comprises at least one of an Fc region, a CL region, and a CH1 region at the carboxy terminus of the second and/or third polypeptide, or wherein the second and/or third polypeptide comprises a CH1-CL, CL-CH1, CH1-Fc, CL-Fc, CL-CH1-Fc, CH1-CL-Fc at the carboxy terminus of the second and/or third polypeptide. In some aspects, the first polypeptide has a structure represented by VH1-L1-VH2-L2-VL2-L3-VL1-L4-CH1-L5-CL-L6-Fc, the second polypeptide has a structure represented by VL3, and the third polypeptide has a structure represented by VH3; optionally wherein the second and/or third polypeptide comprises at least one of an Fc region, a CL region, and a CH1 region at the carboxy terminus of the second and/or third polypeptide, or wherein the second and/or third polypeptide comprises a CH1-CL, CL-CH1, CH1-Fc, CL-Fc, CL-CH1-Fc, CH1-CL-Fc at the carboxy terminus of the second and/or third polypeptide, wherein the CH1-CL, CL-CH1, CH1-Fc, CL-Fc, CL-CH1-Fc, or CH1-CL-Fc region is linked to the carboxy terminus of the second polypeptide via one or more amino acid linker, and wherein the CH1, CL and Fc when present in the second polypeptide are linked to each other via one or more amino acid linker. In some aspects, the first polypeptide has a structure represented by VH1-L1-VH2-L2-VL2-L3-VL1-L4-CH1-L5-CL-L6-Fc, the second polypeptide has a structure represented by VL3, and the third polypeptide has a structure represented by VH3; optionally wherein the second and/or third polypeptide comprises at least one of an Fc region, a CL region, and a CH1 region at the carboxy terminus of the second and/or third polypeptide, or wherein the second and/or third polypeptide comprises a CH1-CL, CL-CH1, CH1-Fc, CL-Fc, CL-CH1-Fc, CH1-CL-Fc at the carboxy terminus of the second and/or third polypeptide, wherein the CH1-CL, CL-CH1, CH1-Fc, CL-Fc, CL-CH1-Fc, or CH1-CL-Fc region is linked to the carboxy terminus of the third polypeptide via one or more amino acid linker, and wherein the CH1, CL and Fc when present in the third polypeptide are linked to each other via one or more amino acid linker. In some aspects, the first polypeptide has a structure represented by VH1-L1-VH2-L2-VL2-L3-VL1-L4-CH1-L5-CL-L6-Fc, the second polypeptide has a structure represented by VL3, and the third polypeptide has a structure represented by VH3; optionally wherein the second and/or third polypeptide comprises at least one of an Fc region, a CL region, and a CH1 region at the carboxy terminus of the second and/or third polypeptide, or wherein the second and/or third polypeptide comprises a CH1-CL, CL-CH1, CH1-Fc, CL-Fc, CL-CH1-Fc, CH1-CL-Fc at the carboxy terminus of the second and/or third polypeptide, wherein the CH1-CL, CL-CH1, CH1-Fc, CL-Fc, CL-CH1-Fc, or CH1-CL-Fc region is linked to the carboxy terminus of the second and third polypeptide via one or more amino acid linker, and wherein the CH1, CL and Fc when present in the second and third polypeptide are linked to each other via one or more amino acid linker. In some aspects, the first polypeptide has a structure represented by VL1-L1-VL2-L2-VH2-L3-VH1-L4-CL-L5-CH1-L6-Fc, the second polypeptide has a structure represented by VL3, and the third polypeptide has a structure represented by VH3; optionally wherein the second and/or third polypeptide comprises at least one of an Fc region, a CL region, and a CH1 region at the carboxy terminus of the second and/or third polypeptide, or wherein the second and/or third polypeptide comprises a CH1-CL, CL-CH1, CH1-Fc, CL-Fc, CL-CH1-Fc, CH1-CL-Fc at the carboxy terminus of the second and/or third polypeptide. In some aspects, the first polypeptide has a structure represented by VL1-L1-VL2-L2-VH2-L3-VH1-L4-CL-L5-CH1-L6-Fc, the second polypeptide has a structure represented by VL3, and the third polypeptide has a structure represented by VH3; optionally wherein the second and/or third polypeptide comprises at least one of an Fc region, a CL region, and a CH1 region at the carboxy terminus of the second and/or third polypeptide, or wherein the second and/or third polypeptide comprises a CH1-CL, CL-CH1, CH1-Fc, CL-Fc, CL-CH1-Fc, CH1-CL-Fc at the carboxy terminus of the second and/or third polypeptide, wherein the CH1-CL, CL-CH1, CH1-Fc, CL-Fc, CL-CH1-Fc, or CH1-CL-Fc region is linked to the carboxy terminus of the second polypeptide via one or more amino acid linker, and wherein the CH1, CL and Fc when present in the second polypeptide are linked to each other via one or more amino acid linker. In some aspects, the first polypeptide has a structure represented by VL1-L1-VL2-L2-VH2-L3-VH1-L4-CL-L5-CH1-L6-Fc, the second polypeptide has a structure represented by VL3, and the third polypeptide has a structure represented by VH3; optionally wherein the second and/or third polypeptide comprises at least one of an Fc region, a CL region, and a CH1 region at the carboxy terminus of the second and/or third polypeptide, or wherein the second and/or third polypeptide comprises a CH1-CL, CL-CH1, CH1-Fc, CL-Fc, CL-CH1-Fc, CH1-CL-Fc at the carboxy terminus of the second and/or third polypeptide, wherein the CH1-CL, CL-CH1, CH1-Fc, CL-Fc, CL-CH1-Fc, or CH1-CL-Fc region is linked to the carboxy terminus of the third polypeptide via one or more amino acid linker, and wherein the CH1, CL and Fc when present in the third polypeptide are linked to each other via one or more amino acid linker. In some aspects, the first polypeptide has a structure represented by VL1-L1-VL2-L2-VH2-L3-VH1-L4-CL-L5-CH1-L6-Fc, the second polypeptide has a structure represented by VL3, and the third polypeptide has a structure represented by VH3; optionally wherein the second and/or third polypeptide comprises at least one of an Fc region, a CL region, and a CH1 region at the carboxy terminus of the second and/or third polypeptide, or wherein the second and/or third polypeptide comprises a CH1-CL, CL-CH1, CH1-Fc, CL-Fc, CL-CH1-Fc, CH1-CL-Fc at the carboxy terminus of the second and/or third polypeptide, wherein the CH1-CL, CL-CH1, CH1-Fc, CL-Fc, CL-CH1-Fc, or CH1-CL-Fc region is linked to the carboxy terminus of the second and third polypeptide via one or more amino acid linker, and wherein the CH1, CL and Fc when present in the second and third polypeptide are linked to each other via one or more amino acid linker. In some aspects, the first polypeptide has a structure represented by VH1-L1-VH2-L2-VL2-L3-VL1-L4-CL-L5-CH1-L6-Fc, the second polypeptide has a structure represented by VL3, and the third polypeptide has a structure represented by VH3; optionally wherein the second and/or third polypeptide comprises at least one of an Fc region, a CL region, and a CH1 region at the carboxy terminus of the second and/or third polypeptide, or wherein the second and/or third polypeptide comprises a CH1-CL, CL-CH1, CH1-Fc, CL-Fc, CL-CH1-Fc, CH1-CL-Fc at the carboxy terminus of the second and/or third polypeptide. In some aspects, the first polypeptide has a structure represented by VH1-L1-VH2-L2-VL2-L3-VL1-L4-CL-L5-CH1-L6-Fc, the second polypeptide has a structure represented by VL3, and the third polypeptide has a structure represented by VH3; optionally wherein the second and/or third polypeptide comprises at least one of an Fc region, a CL region, and a CH1 region at the carboxy terminus of the second and/or third polypeptide, or wherein the second and/or third polypeptide comprises a CH1-CL, CL-CH1, CH1-Fc, CL-Fc, CL-CH1-Fc, CH1-CL-Fc at the carboxy terminus of the second and/or third polypeptide, wherein the CH1-CL, CL-CH1, CH1-Fc, CL-Fc, CL-CH1-Fc, or CH1-CL-Fc region is linked to the carboxy terminus of the second polypeptide via one or more amino acid linker, and wherein the CH1, CL and Fc when present in the second polypeptide are linked to each other via one or more amino acid linker. In some aspects, the first polypeptide has a structure represented by VH1-L1-VH2-L2-VL2-L3-VL1-L4-CL-L5-CH1-L6-Fc, the second polypeptide has a structure represented by VL3, and the third polypeptide has a structure represented by VH3; optionally wherein the second and/or third polypeptide comprises at least one of an Fc region, a CL region, and a CH1 region at the carboxy terminus of the second and/or third polypeptide, or wherein the second and/or third polypeptide comprises a CH1-CL, CL-CH1, CH1-Fc, CL-Fc, CL-CH1-Fc, CH1-CL-Fc at the carboxy terminus of the second and/or third polypeptide, wherein the CH1-CL, CL-CH1, CH1-Fc, CL-Fc, CL-CH1-Fc, or CH1-CL-Fc region is linked to the carboxy terminus of the third polypeptide via one or more amino acid linker, and wherein the CH1, CL and Fc when present in the third polypeptide are linked to each other via one or more amino acid linker. In some aspects, the first polypeptide has a structure represented by VH1-L1-VH2-L2-VL2-L3-VL1-L4-CL-L5-CH1-L6-Fc, the second polypeptide has a structure represented by VL3, and the third polypeptide has a structure represented by VH3; optionally wherein the second and/or third polypeptide comprises at least one of an Fc region, a CL region, and a CH1 region at the carboxy terminus of the second and/or third polypeptide, or wherein the second and/or third polypeptide comprises a CH1-CL, CL-CH1, CH1-Fc, CL-Fc, CL-CH1-Fc, CH1-CL-Fc at the carboxy terminus of the second and/or third polypeptide, wherein the CH1-CL, CL-CH1, CH1-Fc, CL-Fc, CL-CH1-Fc, or CH1-CL-Fc region is linked to the carboxy terminus of the second and third polypeptide via one or more amino acid linker, and wherein the CH1, CL and Fc when present in the second and third polypeptide are linked to each other via one or more amino acid linker.

[0225] In another aspect, the invention is directed to an antigen binding polypeptide complex (e.g., an antibody or antigen binding fragment thereof) comprising a first polypeptide having a structure represented by VL1-VL2-VH2-VH1-Fc, VH1-VH2-VL2-VL1-Fc, VL1-L1-VL2-L2-VH2-L3-VH1-Fc, VH1-L1-VH2-L2-VL2-L3-VH1-Fc, VL1-L1-VL2-L2-VH2-L3-VH1-L4-Fc, or VH1-L1-VH2-L2-VL2-L3-VL1-L4-Fc; and a second polypeptide having a structure represented by VL3-VH3-Fc, VL3-L5-VH3-Fc, VH3-VL3-Fc, VH3-L5-VL3-Fc, VL3-L5-VH3-L6-Fc, or VH3-L5-VL3-L6-Fc; wherein VL1 is a first immunoglobulin light chain variable region that specifically binds to an HIV protein; VL2 is a second immunoglobulin light chain variable region that specifically binds to an HIV protein; VL3 is a third immunoglobulin light chain variable region that specifically binds to an HIV protein; VH1 is a first immunoglobulin heavy chain variable region that specifically binds to an HIV protein; VH2 is a second immunoglobulin heavy chain variable region that specifically binds to an HIV protein; VH3 is a third immunoglobulin heavy chain variable region that specifically binds to an HIV protein; Fc is a region comprising an immunoglobulin heavy chain constant region 2 (CH2), an immunoglobulin heavy chain constant region 3 (CH3), and optionally, an immunoglobulin hinge; and L1, L2, L3, L4, L5 and L6 are amino acid linkers. In some aspects, the first polypeptide has a structure represented by VL1-VL2-VH2-VH1-Fc, VH1-VH2-VL2-VL1-Fc, VL1-L1-VL2-L2-VH2-L3-VH1-Fc, VH1-L1-VH2-L2-VL2-L3-VH1-Fc, VL1-L1-VL2-L2-VH2-L3-VH1-L4-Fc, or VH1-L1-VH2-L2-VL2-L3-VL1-L4-Fc, and the second polypeptide has a structure represented by VL3-VH3-Fc. In some aspects, the first polypeptide has a structure represented by VL1-VL2-VH2-VH1-Fc, VH1-VH2-VL2-VL1-Fc, VL1-L1-VL2-L2-VH2-L3-VH1-Fc, VH1-L1-VH2-L2-VL2-L3-VH1-Fc, VL1-L1-VL2-L2-VH2-L3-VH1-L4-Fc, or VH1-L1-VH2-L2-VL2-L3-VL1-L4-Fc, and the second polypeptide has a structure represented by VL3-L5-VH3-Fc. In some aspects, the first polypeptide has the structure represented by VL1-VL2-VH2-VH1-Fc, VH1-VH2-VL2-VL1-Fc, VL1-L1-VL2-L2-VH2-L3-VH1-Fc, VH1-L1-VH2-L2-VL2-L3-VH1-Fc, VL1-L1-VL2-L2-VH2-L3-VH1-L4-Fc, or VH1-L1-VH2-L2-VL2-L3-VL1-L4-Fc, and the second polypeptide has a structure represented by VH3-VL3-Fc. In some aspects, the first polypeptide has the structure represented by VL1-VL2-VH2-VH1-Fc, VH1-VH2-VL2-VL1-Fc, VL1-L1-VL2-L2-VH2-L3-VH1-Fc, VH1-L1-VH2-L2-VL2-L3-VH1-Fc, VL1-L1-VL2-L2-VH2-L3-VH1-L4-Fc, or VH1-L1-VH2-L2-VL2-L3-VL1-L4-Fc, and the second polypeptide has a structure represented by VH3-L5-VL3-Fc. In some aspects, the first polypeptide has the structure represented by VL1-VL2-VH2-VH1-Fc, VH1-VH2-VL2-VL1-Fc, VL1-L1-VL2-L2-VH2-L3-VH1-Fc, VH1-L1-VH2-L2-VL2-L3-VH1-Fc, VL1-L1-VL2-L2-VH2-L3-VH1-L4-Fc, or VH1-L1-VH2-L2-VL2-L3-VL1-L4-Fc, and a second polypeptide has a structure represented by VL3-L5-VH3-L6-Fc. In some aspects, the first polypeptide has the structure represented by VL1-VL2-VH2-VH1-Fc, VH1-VH2-VL2-VL1-Fc, VL1-L1-VL2-L2-VH2-L3-VH1-Fc, VH1-L1-VH2-L2-VL2-L3-VH1-Fc, VL1-L1-VL2-L2-VH2-L3-VH1-L4-Fc, or VH1-L1-VH2-L2-VL2-L3-VL1-L4-Fc, and a second polypeptide has a structure represented by VH3-L5-VL3-L6-Fc.

[0226] In another aspect, the invention is directed to an antigen binding polypeptide complex (e.g., an antibody or antigen binding fragment thereof) comprising a first polypeptide having a structure represented by VL1-VL2-VH2-VH1-Fc, VH1-VH2-VL2-VL1-Fc, VL1-L1-VL2-L2-VH2-L3-VH1-Fc, VH1-L1-VH2-L2-VL2-L3-VH1-Fc, VL1-L1-VL2-L2-VH2-L3-VH1-L4-Fc, or VH1-L1-VH2-L2-VL2-L3-VL1-L4-Fc; a second polypeptide having a structure represented by VH3-CH1-Fc, VH3-L5-CH1-Fc, VH3-L5-CH1-L6-Fc, VL3-CH1-Fc, VL3-L5-CH1-Fc, or VL3-L5-CH1-L6-Fc; and a third polypeptide having a structure represented by VL3-CL, VL3-L7-CL, VH3-CL, or VH3-L7-CL; wherein VL1 is a first immunoglobulin light chain variable region that specifically binds to an HIV protein; VL2 is a second immunoglobulin light chain variable region that specifically binds to an HIV protein; VL3 is a third immunoglobulin light chain variable region that specifically binds to an HIV protein; VH1 is a first immunoglobulin heavy chain variable region that specifically binds to an HIV protein; VH2 is a second immunoglobulin heavy chain variable region that specifically binds to an HIV protein; VH3 is a third immunoglobulin heavy chain variable region that specifically binds to an HIV protein; Fc is a region comprising an immunoglobulin heavy chain constant region 2 (CH2), an immunoglobulin heavy chain constant region 3 (CH3), and optionally, an immunoglobulin hinge; CH1 is an immunoglobulin heavy chain constant region 1; CL is an immunoglobulin light chain constant region; and L1, L2, L3, L4, L5, L6 and L7 are amino acid linkers. In some aspects, the first polypeptide has a structure represented by VL1-VL2-VH2-VH1-Fc, VH1-VH2-VL2-VL1-Fc, VL1-L1-VL2-L2-VH2-L3-VH1-Fc, VH1-L1-VH2-L2-VL2-L3-VH1-Fc, VL1-L1-VL2-L2-VH2-L3-VH1-L4-Fc, or VH1-L1-VH2-L2-VL2-L3-VL1-L4-Fc, the second polypeptide has a structure represented by VH3-CH1-Fc, and the third polypeptide has a structure represented by VL3-CL. In some aspects, the first polypeptide has a structure represented by VL1-VL2-VH2-VH1-Fc, VH1-VH2-VL2-VL1-Fc, VL1-L1-VL2-L2-VH2-L3-VH1-Fc, VH1-L1-VH2-L2-VL2-L3-VH1-Fc, VL1-L1-VL2-L2-VH2-L3-VH1-L4-Fc, or VH1-L1-VH2-L2-VL2-L3-VL1-L4-Fc, the second polypeptide has a structure represented by VH3-CH1-Fc, and the third polypeptide has a structure represented by VL3-L7-CL. In some aspects, the first polypeptide has a structure represented by VL1-VL2-VH2-VH1-Fc, VH1-VH2-VL2-VL1-Fc, VL1-L1-VL2-L2-VH2-L3-VH1-Fc, VH1-L1-VH2-L2-VL2-L3-VH1-Fc, VL1-L1-VL2-L2-VH2-L3-VH1-L4-Fc, or VH1-L1-VH2-L2-VL2-L3-VL1-L4-Fc, the second polypeptide has a structure represented by VH3-CH1-Fc, and the third polypeptide has a structure represented by VH3-CL. In some aspects, the first polypeptide has a structure represented by VL1-VL2-VH2-VH1-Fc, VH1-VH2-VL2-VL1-Fc, VL1-L1-VL2-L2-VH2-L3-VH1-Fc, VH1-L1-VH2-L2-VL2-L3-VH1-Fc, VL1-L1-VL2-L2-VH2-L3-VH1-L4-Fc, or VH1-L1-VH2-L2-VL2-L3-VL1-L4-Fc, the second polypeptide has a structure represented by VH3-CH1-Fc, and the third polypeptide has a structure represented by VH3-L7-CL. In some aspects, the first polypeptide has a structure represented by VL1-VL2-VH2-VH1-Fc, VH1-VH2-VL2-VL1-Fc, VL1-L1-VL2-L2-VH2-L3-VH1-Fc, VH1-L1-VH2-L2-VL2-L3-VH1-Fc, VL1-L1-VL2-L2-VH2-L3-VH1-L4-Fc, or VH1-L1-VH2-L2-VL2-L3-VL1-L4-Fc, the second polypeptide has a structure represented by VH3-L5-CH1-Fc, and the third polypeptide has a structure represented by VL3-CL. In some aspects, the first polypeptide has a structure represented by VL1-VL2-VH2-VH1-Fc, VH1-VH2-VL2-VL1-Fc, VL1-L1-VL2-L2-VH2-L3-VH1-Fc, VH1-L1-VH2-L2-VL2-L3-VH1-Fc, VL1-L1-VL2-L2-VH2-L3-VH1-L4-Fc, or VH1-L1-VH2-L2-VL2-L3-VL1-L4-Fc, the second polypeptide has a structure represented by VH3-L5-CH1-Fc, and the third polypeptide has a structure represented by VL3-L7-CL. In some aspects, the first polypeptide has a structure represented by VL1-VL2-VH2-VH1-Fc, VH1-VH2-VL2-VL1-Fc, VL1-L1-VL2-L2-VH2-L3-VH1-Fc, VH1-L1-VH2-L2-VL2-L3-VH1-Fc, VL1-L1-VL2-L2-VH2-L3-VH1-L4-Fc, or VH1-L1-VH2-L2-VL2-L3-VL1-L4-Fc, the second polypeptide has a structure represented by VH3-L5-CH1-Fc, and the third polypeptide has a structure represented by VH3-CL. In some aspects, the first polypeptide has a structure represented by VL1-VL2-VH2-VH1-Fc, VH1-VH2-VL2-VL1-Fc, VL1-L1-VL2-L2-VH2-L3-VH1-Fc, VH1-L1-VH2-L2-VL2-L3-VH1-Fc, VL1-L1-VL2-L2-VH2-L3-VH1-L4-Fc, or VH1-L1-VH2-L2-VL2-L3-VL1-L4-Fc, the second polypeptide has a structure represented by VH3-L5-CH1-Fc, and the third polypeptide has a structure represented by VH3-L7-CL. In some aspects, the first polypeptide has a structure represented by VL1-VL2-VH2-VH1-Fc, VH1-VH2-VL2-VL1-Fc, VL1-L1-VL2-L2-VH2-L3-VH1-Fc, VH1-L1-VH2-L2-VL2-L3-VH1-Fc, VL1-L1-VL2-L2-VH2-L3-VH1-L4-Fc, or VH1-L1-VH2-L2-VL2-L3-VL1-L4-Fc, the second polypeptide has a structure represented by VH3-L5-CH1-L6-Fc, and the third polypeptide has a structure represented by VL3-CL. In some aspects, the first polypeptide has a structure represented by VL1-VL2-VH2-VH1-Fc, VH1-VH2-VL2-VL1-Fc, VL1-L1-VL2-L2-VH2-L3-VH1-Fc, VH1-L1-VH2-L2-VL2-L3-VH1-Fc, VL1-L1-VL2-L2-VH2-L3-VH1-L4-Fc, or VH1-L1-VH2-L2-VL2-L3-VL1-L4-Fc, the second polypeptide has a structure represented by VH3-L5-CH1-L6-Fc, and the third polypeptide has a structure represented by VL3-L7-CL. In some aspects, the first polypeptide has a structure represented by VL1-VL2-VH2-VH1-Fc, VH1-VH2-VL2-VL1-Fc, VL1-L1-VL2-L2-VH2-L3-VH1-Fc, VH1-L1-VH2-L2-VL2-L3-VH1-Fc, VL1-L1-VL2-L2-VH2-L3-VH1-L4-Fc, or VH1-L1-VH2-L2-VL2-L3-VL1-L4-Fc, the second polypeptide has a structure represented by VH3-L5-CH1-L6-Fc, and the third polypeptide has a structure represented by VH3-CL. In some aspects, the first polypeptide has a structure represented by VL1-VL2-VH2-VH1-Fc, VH1-VH2-VL2-VL1-Fc, VL1-L1-VL2-L2-VH2-L3-VH1-Fc, VH1-L1-VH2-L2-VL2-L3-VH1-Fc, VL1-L1-VL2-L2-VH2-L3-VH1-L4-Fc, or VH1-L1-VH2-L2-VL2-L3-VL1-L4-Fc, the second polypeptide has a structure represented by VH3-L5-CH1-L6-Fc, and the third polypeptide has a structure represented by VH3-L7-CL. In some aspects, the first polypeptide has a structure represented by VL1-VL2-VH2-VH1-Fc, VH1-VH2-VL2-VL1-Fc, VL1-L1-VL2-L2-VH2-L3-VH1-Fc, VH1-L1-VH2-L2-VL2-L3-VH1-Fc, VL1-L1-VL2-L2-VH2-L3-VH1-L4-Fc, or VH1-L1-VH2-L2-VL2-L3-VL1-L4-Fc, the second polypeptide has a structure represented by VL3-CH1-Fc, and the third polypeptide has a structure represented by VL3-CL. In some aspects, the first polypeptide has a structure represented by VL1-VL2-VH2-VH1-Fc, VH1-VH2-VL2-VL1-Fc, VL1-L1-VL2-L2-VH2-L3-VH1-Fc, VH1-L1-VH2-L2-VL2-L3-VH1-Fc, VL1-L1-VL2-L2-VH2-L3-VH1-L4-Fc, or VH1-L1-VH2-L2-VL2-L3-VL1-L4-Fc, the second polypeptide has a structure represented by VL3-CH1-Fc, and the third polypeptide has a structure represented by VL3-L7-CL. In some aspects, the first polypeptide has a structure represented by VL1-VL2-VH2-VH1-Fc, VH1-VH2-VL2-VL1-Fc, VL1-L1-VL2-L2-VH2-L3-VH1-Fc, VH1-L1-VH2-L2-VL2-L3-VH1-Fc, VL1-L1-VL2-L2-VH2-L3-VH1-L4-Fc, or VH1-L1-VH2-L2-VL2-L3-VL1-L4-Fc, the second polypeptide has a structure represented by VL3-CH1-Fc, and the third polypeptide has a structure represented by VH3-CL. In some aspects, the first polypeptide has a structure represented by VL1-VL2-VH2-VH1-Fc, VH1-VH2-VL2-VL1-Fc, VL1-L1-VL2-L2-VH2-L3-VH1-Fc, VH1-L1-VH2-L2-VL2-L3-VH1-Fc, VL1-L1-VL2-L2-VH2-L3-VH1-L4-Fc, or VH1-L1-VH2-L2-VL2-L3-VL1-L4-Fc, the second polypeptide has a structure represented by VL3-CH1-Fc, and the third polypeptide has a structure represented by VH3-L7-CL. In some aspects, the first polypeptide has a structure represented by VL1-VL2-VH2-VH1-Fc, VH1-VH2-VL2-VL1-Fc, VL1-L1-VL2-L2-VH2-L3-VH1-Fc, VH1-L1-VH2-L2-VL2-L3-VH1-Fc, VL1-L1-VL2-L2-VH2-L3-VH1-L4-Fc, or VH1-L1-VH2-L2-VL2-L3-VL1-L4-Fc, the second polypeptide has a structure represented by VL3-L5-CH1-Fc, and the third polypeptide has a structure represented by VL3-CL. In some aspects, the first polypeptide has a structure represented by VL1-VL2-VH2-VH1-Fc, VH1-VH2-VL2-VL1-Fc, VL1-L1-VL2-L2-VH2-L3-VH1-Fc, VH1-L1-VH2-L2-VL2-L3-VH1-Fc, VL1-L1-VL2-L2-VH2-L3-VH1-L4-Fc, or VH1-L1-VH2-L2-VL2-L3-VL1-L4-Fc, the second polypeptide has a structure represented by VL3-L5-CH1-Fc, and the third polypeptide has a structure represented by VL3-L7-CL. In some aspects, the first polypeptide has a structure represented by VL1-VL2-VH2-VH1-Fc, VH1-VH2-VL2-VL1-Fc, VL1-L1-VL2-L2-VH2-L3-VH1-Fc, VH1-L1-VH2-L2-VL2-L3-VH1-Fc, VL1-L1-VL2-L2-VH2-L3-VH1-L4-Fc, or VH1-L1-VH2-L2-VL2-L3-VL1-L4-Fc, the second polypeptide has a structure represented by VL3-L5-CH1-Fc, and the third polypeptide has a structure represented by VH3-CL. In some aspects, the first polypeptide has a structure represented by VL1-VL2-VH2-VH1-Fc, VH1-VH2-VL2-VL1-Fc, VL1-L1-VL2-L2-VH2-L3-VH1-Fc, VH1-L1-VH2-L2-VL2-L3-VH1-Fc, VL1-L1-VL2-L2-VH2-L3-VH1-L4-Fc, or VH1-L1-VH2-L2-VL2-L3-VL1-L4-Fc, the second polypeptide has a structure represented by VL3-L5-CH1-Fc, and the third polypeptide has a structure represented by VH3-L7-CL. In some aspects, the first polypeptide has a structure represented by VL1-VL2-VH2-VH1-Fc, VH1-VH2-VL2-VL1-Fc, VL1-L1-VL2-L2-VH2-L3-VH1-Fc, VH1-L1-VH2-L2-VL2-L3-VH1-Fc, VL1-L1-VL2-L2-VH2-L3-VH1-L4-Fc, or VH1-L1-VH2-L2-VL2-L3-VL1-L4-Fc, the second polypeptide has a structure represented by VL3-L5-CH1-L6-Fc, and the third polypeptide has a structure represented by VL3-CL. In some aspects, the first polypeptide has a structure represented by VL1-VL2-VH2-VH1-Fc, VH1-VH2-VL2-VL1-Fc, VL1-L1-VL2-L2-VH2-L3-VH1-Fc, VH1-L1-VH2-L2-VL2-L3-VH1-Fc, VL1-L1-VL2-L2-VH2-L3-VH1-L4-Fc, or VH1-L1-VH2-L2-VL2-L3-VL1-L4-Fc, the second polypeptide has a structure represented by VL3-L5-CH1-L6-Fc, and the third polypeptide has a structure represented by VL3-L7-CL. In some aspects, the first polypeptide has a structure represented by VL1-VL2-VH2-VH1-Fc, VH1-VH2-VL2-VL1-Fc, VL1-L1-VL2-L2-VH2-L3-VH1-Fc, VH1-L1-VH2-L2-VL2-L3-VH1-Fc, VL1-L1-VL2-L2-VH2-L3-VH1-L4-Fc, or VH1-L1-VH2-L2-VL2-L3-VL1-L4-Fc, the second polypeptide has a structure represented by VL3-L5-CH1-L6-Fc, and the third polypeptide has a structure represented by VH3-CL. In some aspects, the first polypeptide has a structure represented by VL1-VL2-VH2-VH1-Fc, VH1-VH2-VL2-VL1-Fc, VL1-L1-VL2-L2-VH2-L3-VH1-Fc, VH1-L1-VH2-L2-VL2-L3-VH1-Fc, VL1-L1-VL2-L2-VH2-L3-VH1-L4-Fc, or VH1-L1-VH2-L2-VL2-L3-VL1-L4-Fc, the second polypeptide has a structure represented by VL3-L5-CH1-L6-Fc, and the third polypeptide has a structure represented by VH3-L7-CL.

[0227] In another aspect, the invention is directed to an antigen binding polypeptide complex (e.g., an antibody or antigen binding fragment thereof) comprising a first polypeptide having a structure represented by VL1-VL2-VH2-VH1-Fc, VH1-VH2-VL2-VL1-Fc, VL1-L1-VL2-L2-VH2-L3-VH1-Fc, VH1-L1-VH2-L2-VL2-L3-VH1-Fc; VL1-L1-VL2-L2-VH2-L3-VH1-L4-Fc; or VH1-L1-VH2-L2-VL2-L3-VL1-L4-Fc; and a second polypeptide having a structure represented by CL-VL3-VH3-CH1-Fc, CL-L5-VL3-L6-VH3-L7-CH1-Fc, CL-L5-VL3-L6-VH3-L7-CH1-L8-Fc, CL-VH3-VL3-CH1-Fc; CL-L5-VH3-L6-VL3-L7-CH1-Fc, CL-L5-VH3-L6-VL3-L7-CH1-L8-Fc, CH1-VL3-VH3-CL-Fc, CH1-L5-VL3-L6-VH3-L7-CL-Fc, CH1-L5-VL3-L6-VH3-L7-CL-L8-Fc, CH1-VH3-VL3-CL-Fc; CH1-L5-VH3-L6-VL3-L7-CL-Fc, or CH1-L5-VH3-L6-VL3-L7-CL-L8-Fc; wherein VL1 is a first immunoglobulin light chain variable region that specifically binds to an HIV protein; VL2 is a second immunoglobulin light chain variable region that specifically binds to an HIV protein; VL3 is a third immunoglobulin light chain variable region that specifically binds to an HIV protein; VH1 is a first immunoglobulin heavy chain variable region that specifically binds to an HIV protein; VH2 is a second immunoglobulin heavy chain variable region that specifically binds to an HIV protein; VH3 is a third immunoglobulin heavy chain variable region that specifically binds to an HIV protein; Fc is a region comprising an immunoglobulin heavy chain constant region 2 (CH2), an immunoglobulin heavy chain constant region 3 (CH3), and optionally, an immunoglobulin hinge; CH1 is an immunoglobulin heavy chain constant region 1; CL is an immunoglobulin light chain constant region; and L1, L2, L3, L4, L5, L6, L7 and L8 are amino acid linkers. In some aspects, the first polypeptide has a structure represented by first polypeptide having a structure represented by VL1-VL2-VH2-VH1-Fc, VH1-VH2-VL2-VL1-Fc, VL1-L1-VL2-L2-VH2-L3-VH1-Fc, VH1-L1-VH2-L2-VL2-L3-VH1-Fc; VL1-L1-VL2-L2-VH2-L3-VH1-L4-Fc; or VH1-L1-VH2-L2-VL2-L3-VL1-L4-Fc, and the second polypeptide has a structure represented by CL-VL3-VH3-CH1-Fc. In some aspects, the first polypeptide has a structure represented by first polypeptide having a structure represented by VL1-VL2-VH2-VH1-Fc, VH1-VH2-VL2-VL1-Fc, VL1-L1-VL2-L2-VH2-L3-VH1-Fc, VH1-L1-VH2-L2-VL2-L3-VH1-Fc; VL1-L1-VL2-L2-VH2-L3-VH1-L4-Fc; or VH1-L1-VH2-L2-VL2-L3-VL1-L4-Fc, and the second polypeptide has a structure represented by CL-L5-VL3-L6-VH3-L7-CH1-Fc. In some aspects, the first polypeptide has a structure represented by first polypeptide having a structure represented by VL1-VL2-VH2-VH1-Fc, VH1-VH2-VL2-VL1-Fc, VL1-L1-VL2-L2-VH2-L3-VH1-Fc, VH1-L1-VH2-L2-VL2-L3-VH1-Fc; VL1-L1-VL2-L2-VH2-L3-VH1-L4-Fc; or VH1-L1-VH2-L2-VL2-L3-VL1-L4-Fc, and the second polypeptide has a structure represented by CL-L5-VL3-L6-VH3-L7-CH1-L8-Fc. In some aspects, the first polypeptide has a structure represented by first polypeptide having a structure represented by VL1-VL2-VH2-VH1-Fc, VH1-VH2-VL2-VL1-Fc, VL1-L1-VL2-L2-VH2-L3-VH1-Fc, VH1-L1-VH2-L2-VL2-L3-VH1-Fc; VL1-L1-VL2-L2-VH2-L3-VH1-L4-Fc; or VH1-L1-VH2-L2-VL2-L3-VL1-L4-Fc, and the second polypeptide has a structure represented by CL-VH3-VL3-CH1-Fc. In some aspects, the first polypeptide has a structure represented by first polypeptide having a structure represented by VL1-VL2-VH2-VH1-Fc, VH1-VH2-VL2-VL1-Fc, VL1-L1-VL2-L2-VH2-L3-VH1-Fc, VH1-L1-VH2-L2-VL2-L3-VH1-Fc; VL1-L1-VL2-L2-VH2-L3-VH1-L4-Fc; or VH1-L1-VH2-L2-VL2-L3-VL1-L4-Fc, and the second polypeptide has a structure represented by CL-L5-VH3-L6-VL3-L7-CH1-Fc. In some aspects, the first polypeptide has a structure represented by first polypeptide having a structure represented by VL1-VL2-VH2-VH1-Fc, VH1-VH2-VL2-VL1-Fc, VL1-L1-VL2-L2-VH2-L3-VH1-Fc, VH1-L1-VH2-L2-VL2-L3-VH1-Fc; VL1-L1-VL2-L2-VH2-L3-VH1-L4-Fc; or VH1-L1-VH2-L2-VL2-L3-VL1-L4-Fc, and the second polypeptide has a structure represented by CL-L5-VH3-L6-VL3-L7-CH1-L8-Fc. In some aspects, the first polypeptide has a structure represented by first polypeptide having a structure represented by VL1-VL2-VH2-VH1-Fc, VH1-VH2-VL2-VL1-Fc, VL1-L1-VL2-L2-VH2-L3-VH1-Fc, VH1-L1-VH2-L2-VL2-L3-VH1-Fc; VL1-L1-VL2-L2-VH2-L3-VH1-L4-Fc; or VH1-L1-VH2-L2-VL2-L3-VL1-L4-Fc, and the second polypeptide has a structure represented by CH1-VL3-VH3-CL-Fc. In some aspects, the first polypeptide has a structure represented by first polypeptide having a structure represented by VL1-VL2-VH2-VH1-Fc, VH1-VH2-VL2-VL1-Fc, VL1-L1-VL2-L2-VH2-L3-VH1-Fc, VH1-L1-VH2-L2-VL2-L3-VH1-Fc; VL1-L1-VL2-L2-VH2-L3-VH1-L4-Fc; or VH1-L1-VH2-L2-VL2-L3-VL1-L4-Fc, and the second polypeptide has a structure represented by CH1-L5-VL3-L6-VH3-L7-CL-Fc. In some aspects, the first polypeptide has a structure represented by first polypeptide having a structure represented by VL1-VL2-VH2-VH1-Fc, VH1-VH2-VL2-VL1-Fc, VL1-L1-VL2-L2-VH2-L3-VH1-Fc, VH1-L1-VH2-L2-VL2-L3-VH1-Fc; VL1-L1-VL2-L2-VH2-L3-VH1-L4-Fc; or VH1-L1-VH2-L2-VL2-L3-VL1-L4-Fc, and the second polypeptide has a structure represented by CH1-L5-VL3-L6-VH3-L7-CL-L8-Fc. In some aspects, the first polypeptide has a structure represented by first polypeptide having a structure represented by VL1-VL2-VH2-VH1-Fc, VH1-VH2-VL2-VL1-Fc, VL1-L1-VL2-L2-VH2-L3-VH1-Fc, VH1-L1-VH2-L2-VL2-L3-VH1-Fc; VL1-L1-VL2-L2-VH2-L3-VH1-L4-Fc; or VH1-L1-VH2-L2-VL2-L3-VL1-L4-Fc, and the second polypeptide has a structure represented by CH1-VH3-VL3-CL-Fc. In some aspects, the first polypeptide has a structure represented by first polypeptide having a structure represented by VL1-VL2-VH2-VH1-Fc, VH1-VH2-VL2-VL1-Fc, VL1-L1-VL2-L2-VH2-L3-VH1-Fc, VH1-L1-VH2-L2-VL2-L3-VH1-Fc; VL1-L1-VL2-L2-VH2-L3-VH1-L4-Fc; or VH1-L1-VH2-L2-VL2-L3-VL1-L4-Fc, and the second polypeptide has a structure represented by CH1-L5-VH3-L6-VL3-L7-CL-Fc. In some aspects, the first polypeptide has a structure represented by first polypeptide having a structure represented by VL1-VL2-VH2-VH1l-Fc, VH1-VH2-VL2-VL1-Fc, VL1-L1-VL2-L2-VH2-L3-VH1-Fc, VH1-L1-VH2-L2-VL2-L3-VH1-Fc; VL1-L1-VL2-L2-VH2-L3-VH1-L4-Fc; or VH1-L1-VH2-L2-VL2-L3-VL1-L4-Fc, and the second polypeptide has a structure represented by CH1-L5-VH3-L6-VL3-L7-CL-L8-Fc.

[0228] In another aspect, the invention is directed to an antigen binding polypeptide complex (e.g., an antibody or antigen binding fragment thereof) comprising a first polypeptide having a structure represented by VL1-VL2-VH2-VH1-Fc, VH1-VH2-VL2-VL1-Fc, VL1-L1-VL2-L2-VH2-L3-VH1-Fc, VH1-L1-VH2-L2-VL2-L3-VH1-Fc, VL1-L1-VL2-L2-VH2-L3-VH1-L4-Fc, or VH1-L1-VH2-L2-VL2-L3-VL1-L4-Fc, and a second polypeptide having a structure represented by VL3-CL-VH3-CH1-Fc, VL3-L5-CL-L6-VH3-L7-CH1-Fc, VL3-L5-CL-L6-VH3-L7-CH1-L8-Fc, VH3-CL-VL3-CH1-Fc, VH3-L5-CL-L6-VL3-L7-CH1-Fc, VH3-L5-CL-L6-VL3-L7-CH1-L8-Fc, VL3-CH1-VH3-CL-Fc, VL3-L5-CH1-L6-VH3-L7-CL-Fc, VL3-L5-CH1-L6-VH3-L7-CL-L8-Fc, VH3-CH1-VL3-CL-Fc, VH3-L5-CH1-L6-VL3-L7-CL-Fc, or VH3-L5-CH1-L6-VL3-L7-CL-L8-Fc; wherein VL1 is a first immunoglobulin light chain variable region that specifically binds to an HIV protein; VL2 is a second immunoglobulin light chain variable region that specifically binds to an HIV protein; VL3 is a third immunoglobulin light chain variable region that specifically binds to an HIV protein; VH1 is a first immunoglobulin heavy chain variable region that specifically binds to an HIV protein; VH2 is a second immunoglobulin heavy chain variable region that specifically binds to an HIV protein; VH3 is a third immunoglobulin heavy chain variable region that specifically binds to an HIV protein; Fc is a region comprising an immunoglobulin heavy chain constant region 2 (CH2), an immunoglobulin heavy chain constant region 3 (CH3), and optionally, an immunoglobulin hinge; CH1 is an immunoglobulin heavy chain constant region 1; CL is an immunoglobulin light chain constant region; and L1, L2, L3, L4, L5, L6, L7 and L8 are amino acid linkers. In some aspects, the first polypeptide has a structure represented by VL1-VL2-VH2-VH1-Fc, VH1-VH2-VL2-VL1-Fc, VL1-L1-VL2-L2-VH2-L3-VH1-Fc, VH1-L1-VH2-L2-VL2-L3-VH1-Fc, VL1-L1-VL2-L2-VH2-L3-VH1-L4-Fc, or VH1-L1-VH2-L2-VL2-L3-VL1-L4-Fc, and the second polypeptide has the structure represented by VL3-CL-VH3-CH1-Fc. In some aspects, the first polypeptide has a structure represented by VL1-VL2-VH2-VH1-Fc, VH1-VH2-VL2-VL1-Fc, VL1-L1-VL2-L2-VH2-L3-VH1-Fc, VH1-L1-VH2-L2-VL2-L3-VH1-Fc, VL1-L1-VL2-L2-VH2-L3-VH1-L4-Fc, or VH1-L1-VH2-L2-VL2-L3-VL1-L4-Fc, and the second polypeptide has the structure represented by VL3-L5-CL-L6-VH3-L7-CH1-Fc. In some aspects, the first polypeptide has a structure represented by VL1-VL2-VH2-VH1-Fc, VH1-VH2-VL2-VL1-Fc, VL1-L1-VL2-L2-VH2-L3-VH1-Fc, VH1-L1-VH2-L2-VL2-L3-VH1-Fc, VL1-L1-VL2-L2-VH2-L3-VH1-L4-Fc, or VH1-L1-VH2-L2-VL2-L3-VL1-L4-Fc, and the second polypeptide has the structure represented by VL3-L5-CL-L6-VH3-L7-CH1-L8-Fc. In some aspects, the first polypeptide has a structure represented by VL1-VL2-VH2-VH11-Fc, VH1-VH2-VL2-VL1-Fc, VL1-L1-VL2-L2-VH2-L3-VH1-Fc, VH1-L1-VH2-L2-VL2-L3-VH1-Fc, VL1-L1-VL2-L2-VH2-L3-VH1-L4-Fc, or VH1-L1-VH2-L2-VL2-L3-VL1-L4-Fc, and the second polypeptide has the structure represented by VH3-CL-VL3-CH1-Fe. In some aspects, the first polypeptide has a structure represented by VL1-VL2-VH2-VH1-Fc, VH1-VH2-VL2-VL1-Fc, VL1-L1-VL2-L2-VH2-L3-VH1-Fc, VH1-L1-VH2-L2-VL2-L3-VH1-Fc, VL1-L1-VL2-L2-VH2-L3-VH1-L4-Fc, or VH1-L1-VH2-L2-VL2-L3-VL1-L4-Fc, and the second polypeptide has the structure represented by VH3-L5-CL-L6-VL3-L7-CH1-Fc. In some aspects, the first polypeptide has a structure represented by VL1-VL2-VH2-VH1-Fc, VH1-VH2-VL2-VL1-Fc, VL1-L1-VL2-L2-VH2-L3-VH1-Fc, VH1-L1-VH2-L2-VL2-L3-VH1-Fc, VL1-L1-VL2-L2-VH2-L3-VH1-L4-Fc, or VH1-L1-VH2-L2-VL2-L3-VL1-L4-Fc, and the second polypeptide has the structure represented by VH3-L5-CL-L6-VL3-L7-CH1-L8-Fc. In some aspects, the first polypeptide has a structure represented by VL1-VL2-VH2-VH1-Fc, VH1-VH2-VL2-VL1-Fc, VL1-L1-VL2-L2-VH2-L3-VH1-Fc, VH1-L1-VH2-L2-VL2-L3-VH1-Fc, VL1-L1-VL2-L2-VH2-L3-VH1-L4-Fc, or VH1-L1-VH2-L2-VL2-L3-VL1-L4-Fc, and the second polypeptide has the structure represented by VL3-CH1-VH3-CL-Fc. In some aspects, the first polypeptide has a structure represented by VL1-VL2-VH2-VH1-Fc, VH1-VH2-VL2-VL1-Fc, VL1-L1-VL2-L2-VH2-L3-VH1-Fc, VH1-L1-VH2-L2-VL2-L3-VH1-Fc, VL1-L1-VL2-L2-VH2-L3-VH1-L4-Fc, or VH1-L1-VH2-L2-VL2-L3-VL1-L4-Fc, and the second polypeptide has the structure represented by VL3-L5-CH1-L6-VH3-L7-CL-Fc. In some aspects, the first polypeptide has a structure represented by VL1-VL2-VH2-VH1-Fc, VH1-VH2-VL2-VL1-Fc, VL1-L1-VL2-L2-VH2-L3-VH1-Fc, VH1-L1-VH2-L2-VL2-L3-VH1-Fc, VL1-L1-VL2-L2-VH2-L3-VH1-L4-Fc, or VH1-L1-VH2-L2-VL2-L3-VL1-L4-Fc, and the second polypeptide has the structure represented by VL3-L5-CH1-L6-VH3-L7-CL-L8-Fc. In some aspects, the first polypeptide has a structure represented by VL1-VL2-VH2-VH1-Fc, VH1-VH2-VL2-VL1-Fc, VL1-L1-VL2-L2-VH2-L3-VH1-Fc, VH1-L1-VH2-L2-VL2-L3-VH1-Fc, VL1-L1-VL2-L2-VH2-L3-VH1-L4-Fc, or VH1-L1-VH2-L2-VL2-L3-VL1-L4-Fc, and the second polypeptide has the structure represented by VH3-CH1-VL3-CL-Fc. In some aspects, the first polypeptide has a structure represented by VL1-VL2-VH2-VH1-Fc, VH1-VH2-VL2-VL1-Fc, VL1-L1-VL2-L2-VH2-L3-VH1-Fc, VH1-L1-VH2-L2-VL2-L3-VH1-Fc, VL1-L1-VL2-L2-VH2-L3-VH1-L4-Fc, or VH1-L1-VH2-L2-VL2-L3-VL1-L4-Fc, and the second polypeptide has the structure represented by VH3-L5-CH1-L6-VL3-L7-CL-Fc. In some aspects, the first polypeptide has a structure represented by VL1-VL2-VH2-VH1-Fc, VH1-VH2-VL2-VL1-Fc, VL1-L1-VL2-L2-VH2-L3-VH1-Fc, VH1-L1-VH2-L2-VL2-L3-VH1-Fc, VL1-L1-VL2-L2-VH2-L3-VH1-L4-Fc, or VH1-L1-VH2-L2-VL2-L3-VL1-L4-Fc, and the second polypeptide has the structure represented by VH3-L5-CH1-L6-VL3-L7-CL-L8-Fc.

[0229] In another aspect, the invention is directed to an antigen binding polypeptide complex (e.g., an antibody or antigen binding fragment thereof) comprising a first polypeptide having a structure represented by VL1-VL2-VH2-VH1-Fc, VH1-VH2-VL2-VL1-Fc, VL1-L1-VL2-L2-VH2-L3-VH1-Fc, VH1-L1-VH2-L2-VL2-L3-VH1-Fc, VL1-L1-VL2-L2-VH2-L3-VH1-L4-Fc, or VH1-L1-VH2-L2-VL2-L3-VL1-L4-Fc; and a second polypeptide having a structure represented by VL3-VH3-CL-CH1-Fc, VL3-L5-VH3-L6-CL-CH1-Fc, VL3-L5-VH3-L6-CL-L7-CH1-Fc, VL3-L5-VH3-L6-CL-L7-CH1-L8-Fc, VH3-VL3-CL-CH1-Fc, VH3-L5-VL3-L6-CL-CH1-Fc, VH3-L5-VL3-L6-CL-L7-CH1-Fc, VH3-L5-VL3-L6-CL-L7-CH1-L8-Fc, VL3-VH3-CH1-CL-Fc, VL3-L5-VH3-L6-CH1-CL-Fc, VL3-L5-VH3-L6-CH1-L7-CL-Fc, VL3-L5-VH3-L6-CH1-L7-CL-L8-Fc, VH3-VL3-CH1-CL-Fc, VH3-L5-VL3-L6-CH1-CL-Fc; VH3-L5-VL3-L6-CH1-L7-CL-Fc; or VH3-L5-VL3-L6-CH1-L7-CL-L8-Fc; wherein VL1 is a first immunoglobulin light chain variable region that specifically binds to an HIV protein; VL2 is a second immunoglobulin light chain variable region that specifically binds to an HIV protein; VL3 is a third immunoglobulin light chain variable region that specifically binds to an HIV protein; VH1 is a first immunoglobulin heavy chain variable region that specifically binds to an HIV protein; VH2 is a second immunoglobulin heavy chain variable region that specifically binds to an HIV protein; VH3 is a third immunoglobulin heavy chain variable region that specifically binds to an HIV protein; Fc is a region comprising an immunoglobulin heavy chain constant region 2 (CH2), an immunoglobulin heavy chain constant region 3 (CH3), and optionally, an immunoglobulin hinge; CH1 is an immunoglobulin heavy chain constant region 1; CL is an immunoglobulin light chain constant region; and L1, L2, L3, L4, L5, L6, L7 and L8 are amino acid linkers. In some aspects, the first polypeptide has the structure represented by VL1-VL2-VH2-VH1-Fc, and the second polypeptide has a structure represented by VL3-VH3-CL-CH1-Fc, VL3-L5-VH3-L6-CL-CH1-Fc, VL3-L5-VH3-L6-CL-L7-CH1-Fc, VL3-L5-VH3-L6-CL-L7-CH1-L8-Fc, VH3-VL3-CL-CH1-Fc, VH3-L5-VL3-L6-CL-CH1-Fc, VH3-L5-VL3-L6-CL-L7-CH1-Fc, VH3-L5-VL3-L6-CL-L7-CH1-L8-Fc, VL3-VH3-CH1-CL-Fc, VL3-L5-VH3-L6-CH1-CL-Fc, VL3-L5-VH3-L6-CH1-L7-CL-Fc, VL3-L5-VH3-L6-CH1-L7-CL-L8-Fc, VH3-VL3-CH1-CL-Fc, VH3-L5-VL3-L6-CH1-CL-Fc; VH3-L5-VL3-L6-CH1-L7-CL-Fc; or VH3-L5-VL3-L6-CH1-L7-CL-L8-Fc. In some aspects, the first polypeptide has the structure represented by VH1-VH2-VL2-VL1-Fc, and the second polypeptide has a structure represented by VL3-VH3-CL-CH1-Fc, VL3-L5-VH3-L6-CL-CH1-Fc, VL3-L5-VH3-L6-CL-L7-CH1-Fc, VL3-L5-VH3-L6-CL-L7-CH1-L8-Fc, VH3-VL3-CL-CH1-Fc, VH3-L5-VL3-L6-CL-CH1-Fc, VH3-L5-VL3-L6-CL-L7-CH1-Fc, VH3-L5-VL3-L6-CL-L7-CH1-L8-Fc, VL3-VH3-CH1-CL-Fc, VL3-L5-VH3-L6-CH1-CL-Fc, VL3-L5-VH3-L6-CH1-L7-CL-Fc, VL3-L5-VH3-L6-CH1-L7-CL-L8-Fc, VH3-VL3-CH1-CL-Fc, VH3-L5-VL3-L6-CH1-CL-Fc; VH3-L5-VL3-L6-CH1-L7-CL-Fc; or VH3-L5-VL3-L6-CH1-L7-CL-L8-Fc. In some aspects, the first polypeptide has the structure represented by VL1-L1-VL2-L2-VH2-L3-VH1-Fc, and the second polypeptide has a structure represented by VL3-VH3-CL-CH1-Fc, VL3-L5-VH3-L6-CL-CH1-Fc, VL3-L5-VH3-L6-CL-L7-CH1-Fc, VL3-L5-VH3-L6-CL-L7-CH1-L8-Fc, VH3-VL3-CL-CH1-Fc, VH3-L5-VL3-L6-CL-CH1-Fc, VH3-L5-VL3-L6-CL-L7-CH1-Fc, VH3-L5-VL3-L6-CL-L7-CH1-L8-Fc, VL3-VH3-CH1-CL-Fc, VL3-L5-VH3-L6-CH1-CL-Fc, VL3-L5-VH3-L6-CH1-L7-CL-Fc, VL3-L5-VH3-L6-CH1-L7-CL-L8-Fc, VH3-VL3-CH1-CL-Fc, VH3-L5-VL3-L6-CH1-CL-Fc; VH3-L5-VL3-L6-CH1-L7-CL-Fc; or VH3-L5-VL3-L6-CH1-L7-CL-L8-Fc. In some aspects, the first polypeptide has the structure represented by VH1-L1-VH2-L2-VL2-L3-VH1-Fc, and the second polypeptide has a structure represented by VL3-VH3-CL-CH1-Fc, VL3-L5-VH3-L6-CL-CH1-Fc, VL3-L5-VH3-L6-CL-L7-CH1-Fc, VL3-L5-VH3-L6-CL-L7-CH1-L8-Fc, VH3-VL3-CL-CH1-Fc, VH3-L5-VL3-L6-CL-CH1-Fc, VH3-L5-VL3-L6-CL-L7-CH1-Fc, VH3-L5-VL3-L6-CL-L7-CH1-L8-Fc, VL3-VH3-CH1-CL-Fc, VL3-L5-VH3-L6-CH1-CL-Fc, VL3-L5-VH3-L6-CH1-L7-CL-Fc, VL3-L5-VH3-L6-CH1-L7-CL-L8-Fc, VH3-VL3-CH1-CL-Fc, VH3-L5-VL3-L6-CH1-CL-Fc; VH3-L5-VL3-L6-CH1-L7-CL-Fc; or VH3-L5-VL3-L6-CH1-L7-CL-L8-Fc. In some aspects, the first polypeptide has the structure represented by VL1-L1-VL2-L2-VH2-L3-VH1-L4-Fc, and the second polypeptide has a structure represented by VL3-VH3-CL-CH1-Fc, VL3-L5-VH3-L6-CL-CH1-Fc, VL3-L5-VH3-L6-CL-L7-CH1-Fc, VL3-L5-VH3-L6-CL-L7-CH1-L8-Fc, VH3-VL3-CL-CH1-Fc, VH3-L5-VL3-L6-CL-CH1-Fc, VH3-L5-VL3-L6-CL-L7-CH1-Fc, VH3-L5-VL3-L6-CL-L7-CH1-L8-Fc, VL3-VH3-CH1-CL-Fc, VL3-L5-VH3-L6-CH1-CL-Fc, VL3-L5-VH3-L6-CH1-L7-CL-Fc, VL3-L5-VH3-L6-CH1-L7-CL-L8-Fc, VH3-VL3-CH1-CL-Fc, VH3-L5-VL3-L6-CH1-CL-Fc; VH3-L5-VL3-L6-CH1-L7-CL-Fc; or VH3-L5-VL3-L6-CH1-L7-CL-L8-Fe. In some aspects, the first polypeptide has the structure represented by VH1-L1-VH2-L2-VL2-L3-VL1-L4-Fc and the second polypeptide has a structure represented by VL3-VH3-CL-CH1-Fc, VL3-L5-VH3-L6-CL-CH1-Fc, VL3-L5-VH3-L6-CL-L7-CH1-Fc, VL3-L5-VH3-L6-CL-L7-CH1-L8-Fc, VH3-VL3-CL-CH1-Fc, VH3-L5-VL3-L6-CL-CH1-Fc, VH3-L5-VL3-L6-CL-L7-CH1-Fe, VH3-L5-VL3-L6-CL-L7-CH1-L8-Fc, VL3-VH3-CH1-CL-Fc, VL3-L5-VH3-L6-CH1-CL-Fc, VL3-L5-VH3-L6-CH1-L7-CL-Fc, VL3-L5-VH3-L6-CH1-L7-CL-L8-Fc, VH3-VL3-CH1-CL-Fc, VH3-L5-VL3-L6-CH1-CL-Fc; VH3-L5-VL3-L6-CH1-L7-CL-Fc; or VH3-L5-VL3-L6-CH1-L7-CL-L8-Fc.

[0230] In another aspect, the invention is directed to an antigen binding polypeptide complex (e.g., an antibody or antigen binding fragment thereof) comprising a first polypeptide having a structure represented by VL1-VL2-VH2-VH1-CH1-Fc, VH1-VH2-VL2-VL1-CH1-Fc, VL1-L1-VL2-L2-VH2-L3-VH1-CH1-Fc, VH1-L1-VH2-L2-VL2-L3-VH1-CH1-Fc, VL1-L1-VL2-L2-VH2-L3-VH1-L4-CH1-Fc, VH1-L1-VH2-L2-VL2-L3-VH1-L4-CH1-Fc, VL1-L1-VL2-L2-VH2-L3-VH1-L4-CH1-L5-Fc, VH1-L1-VH2-L2-VL2-L3-VH1-L4-CH1-L5-Fc, VL1-VL2-VH2-VH1-CL-Fc, VH1-VH2-VL2-VL1-CL-Fc, VL1-L1-VL2-L2-VH2-L3-VH1-CL-Fc, VH1-L1-VH2-L2-VL2-L3-VH1-CL-Fc, VL1-L1-VL2-L2-VH2-L3-VH1-L4-CL-Fc, VH1-L1-VH2-L2-VL2-L3-VH1-L4-CL-Fc, VL1-L1-VL2-L2-VH2-L3-VH1-L4-CL-L5-Fc, or VH1-L1-VH2-L2-VL2-L3-VH1-L4-CL-L5-Fc; and a second polypeptide having a structure represented by VL3-VH3-CL-Fc, VL3-L6-VH3-L7-CL-Fc, VL3-L6-VH3-L7-CL-L8-Fc, VH3-VL3-CL-Fc, VH3-L6-VL3-L7-CL-Fc, VH3-L6-VL3-L7-CL-L8-Fc, VL3-VH3-CH1-Fc, VL3-L6-VH3-L7-CH1-Fc, VL3-L6-VH3-L7-CH1-L8-Fc, VH3-VL3-CH1-Fc, VH3-L6-VL3-L7-CH1-Fc, or VH3-L6-VL3-L7-CH1-L8-Fc; wherein VL1 is a first immunoglobulin light chain variable region that specifically binds to an HIV protein; VL2 is a second immunoglobulin light chain variable region that specifically binds to an HIV protein; VL3 is a third immunoglobulin light chain variable region that specifically binds to an HIV protein; VH1 is a first immunoglobulin heavy chain variable region that specifically binds to an HIV protein; VH2 is a second immunoglobulin heavy chain variable region that specifically binds to an HIV protein; VH3 is a third immunoglobulin heavy chain variable region that specifically binds to an HIV protein; Fc is a region comprising an immunoglobulin heavy chain constant region 2 (CH2), an immunoglobulin heavy chain constant region 3 (CH3), and optionally, an immunoglobulin hinge; CH1 is an immunoglobulin heavy chain constant region 1; CL is an immunoglobulin light chain constant region; and L1, L2, L3, L4, L5, L6, L7 and L8 are amino acid linkers. In some aspects, the first polypeptide has the structure represented by VL1-VL2-VH2-VH1-CH1-Fc, VH1-VH2-VL2-VL1-CH1-Fc, VL1-L1-VL2-L2-VH2-L3-VH1-CH1-Fc, VH1-L1-VH2-L2-VL2-L3-VH1-CH1-Fc, VL1-L1-VL2-L2-VH2-L3-VH1-L4-CH1-Fc, VH1-L1-VH2-L2-VL2-L3-VH1-L4-CH1-Fc, VL1-L1-VL2-L2-VH2-L3-VH1-L4-CH1-L5-Fc, VH1-L1-VH2-L2-VL2-L3-VH1-L4-CH1-L5-Fc, VL1-VL2-VH2-VH1-CL-Fc, VH1-VH2-VL2-VL1-CL-Fc, VL1-L1-VL2-L2-VH2-L3-VH1-CL-Fc, VH1-L1-VH2-L2-VL2-L3-VH1-CL-Fc, VL1-L1-VL2-L2-VH2-L3-VH1-L4-CL-Fc, VH1-L1-VH2-L2-VL2-L3-VH1-L4-CL-Fc, VL1-L1-VL2-L2-VH2-L3-VH1-L4-CL-L5-Fc, or VH1-L1-VH2-L2-VL2-L3-VH1-L4-CL-L5-Fc and the second polypeptide has a structure represented by VL3-VH3-CL-Fe. In some aspects, the first polypeptide has the structure represented by VL1-VL2-VH2-VH1-CH1-Fc, VH1-VH2-VL2-VL1-CH1-Fc, VL1-L1-VL2-L2-VH2-L3-VH1-CH1-Fc, VH1-L1-VH2-L2-VL2-L3-VH1-CH1-Fc, VL1-L1-VL2-L2-VH2-L3-VH1-L4-CH1-Fc, VH1-L1-VH2-L2-VL2-L3-VH1-L4-CH1-Fc, VL1-L1-VL2-L2-VH2-L3-VH1-L4-CH1-L5-Fc, VH1-L1-VH2-L2-VL2-L3-VH1-L4-CH1-L5-Fc, VL1-VL2-VH2-VH1-CL-Fc, VH1-VH2-VL2-VL1-CL-Fc, VL1-L1-VL2-L2-VH2-L3-VH1-CL-Fc, VH1-L1-VH2-L2-VL2-L3-VH1-CL-Fc, VL1-L1-VL2-L2-VH2-L3-VH1-L4-CL-Fc, VH1-L1-VH2-L2-VL2-L3-VH1-L4-CL-Fc, VL1-L1-VL2-L2-VH2-L3-VH1-L4-CL-L5-Fc, or VH1-L1-VH2-L2-VL2-L3-VH1-L4-CL-L5-Fc and the second polypeptide has a structure represented by VL3-L6-VH3-L7-CL-Fc. In some aspects, the first polypeptide has the structure represented by VL1-VL2-VH2-VH1-CH1-Fc, VH1-VH2-VL2-VL1-CH1-Fc, VL1-L1-VL2-L2-VH2-L3-VH1-CH1-Fc, VH1-L1-VH2-L2-VL2-L3-VH1-CH1-Fc, VL1-L1-VL2-L2-VH2-L3-VH1-L4-CH1-Fc, VH1-L1-VH2-L2-VL2-L3-VH1-L4-CH1-Fc, VL1-L1-VL2-L2-VH2-L3-VH1-L4-CH1-L5-Fc, VH1-L1-VH2-L2-VL2-L3-VH1-L4-CH1-L5-Fc, VL1-VL2-VH2-VH-CL-Fc, VH1-VH2-VL2-VL1-CL-Fc, VL1-L1-VL2-L2-VH2-L3-VH1-CL-Fc, VH1-L1-VH2-L2-VL2-L3-VH1-CL-Fc, VL1-L1-VL2-L2-VH2-L3-VH1-L4-CL-Fc, VH1-L1-VH2-L2-VL2-L3-VH1-L4-CL-Fc, VL1-L1-VL2-L2-VH2-L3-VH1-L4-CL-L5-Fc, or VH1-L1-VH2-L2-VL2-L3-VH1-L4-CL-L5-Fc and the second polypeptide has a structure represented by VL3-L6-VH3-L7-CL-L8-Fc. In some aspects, the first polypeptide has the structure represented by VL1-VL2-VH2-VH1-CH1-Fc, VH1-VH2-VL2-VL1-CH1-Fe, VL1-L1-VL2-L2-VH2-L3-VH1-CH1-Fc, VH1-L1-VH2-L2-VL2-L3-VH-CH1-Fc, VL1-L1-VL2-L2-VH2-L3-VH1-L4-CH1-Fc, VH1-L1-VH2-L2-VL2-L3-VH1-L4-CH1-Fc, VL1-L1-VL2-L2-VH2-L3-VH1-L4-CH1-L5-Fc, VH1-L1-VH2-L2-VL2-L3-VH1-L4-CH1-L5-Fc, VL1-VL2-VH2-VH1-CL-Fc, VH1-VH2-VL2-VL1-CL-Fc, VL1-L1-VL2-L2-VH2-L3-VH1-CL-Fc, VH1-L1-VH2-L2-VL2-L3-VH1-CL-Fc, VL1-L1-VL2-L2-VH2-L3-VH1-L4-CL-Fc, VH1-L1-VH2-L2-VL2-L3-VH1-L4-CL-Fc, VL1-L1-VL2-L2-VH2-L3-VH1-L4-CL-L5-Fc, or VH1-L1-VH2-L2-VL2-L3-VH1-L4-CL-L5-Fc and the second polypeptide has a structure represented by VH3-VL3-CL-Fc. In some aspects, the first polypeptide has the structure represented by VL1-VL2-VH2-VH1-CH1-Fc, VH1-VH2-VL2-VL1-CH1-Fc, VL1-L1-VL2-L2-VH2-L3-VH1-CH1-Fc, VH1-L1-VH2-L2-VL2-L3-VH1-CH1-Fc, VL1-L1-VL2-L2-VH2-L3-VH1-L4-CH-Fc, VH1-L1-VH2-L2-VL2-L3-VH1-L4-CH1-Fc, VL1-L1-VL2-L2-VH2-L3-VH1-L4-CH1-L5-Fc, VH1-L1-VH2-L2-VL2-L3-VH1-L4-CH1-L5-Fc, VL1-VL2-VH2-VH1-CL-Fc, VH1-VH2-VL2-VL1-CL-Fc, VL1-L1-VL2-L2-VH2-L3-VH1-CL-Fc, VH1-L1-VH2-L2-VL2-L3-VH1-CL-Fc, VL1-L1-VL2-L2-VH2-L3-VH1-L4-CL-Fc, VH1-L1-VH2-L2-VL2-L3-VH-L4-CL-Fc, VL1-L1-VL2-L2-VH2-L3-VH1-L4-CL-L5-Fc, or VH1-L1-VH2-L2-VL2-L3-VH1-L4-CL-L5-Fc and the second polypeptide has a structure represented by VH3-L6-VL3-L7-CL-Fe. In some aspects, the first polypeptide has the structure represented by VL1-VL2-VH2-VH1-CH1-Fc, VH1-VH2-VL2-VL1-CH1-Fc, VL1-L1-VL2-L2-VH2-L3-VH-CH1-Fc, VH1-L1-VH2-L2-VL2-L3-VH-CH1-Fc, VL1-L1-VL2-L2-VH2-L3-VH1-L4-CH1-Fc, VH1-L1-VH2-L2-VL2-L3-VH1-L4-CH1-Fc, VL1-L1-VL2-L2-VH2-L3-VH1-L4-CH1-L5-Fc, VH1-L1-VH2-L2-VL2-L3-VH1-L4-CH1-L5-Fc, VL1-VL2-VH2-VH1-CL-Fc, VH1-VH2-VL2-VL1-CL-Fc, VL1-L1-VL2-L2-VH2-L3-VH1-CL-Fc, VH1-L1-VH2-L2-VL2-L3-VH-CL-Fc, VL1-L1-VL2-L2-VH2-L3-VH1-L4-CL-Fc, VH1-L1-VH2-L2-VL2-L3-VH-L4-CL-Fe, VL1-L1-VL2-L2-VH2-L3-VH1-L4-CL-L5-Fc, or VH1-L1-VH2-L2-VL2-L3-VH-L4-CL-L5-Fc and the second polypeptide has a structure represented by VH3-L6-VL3-L7-CL-L8-Fc. In some aspects, the first polypeptide has the structure represented by VL1-VL2-VH2-VH1-CH1-Fc, VH1-VH2-VL2-VL1-CH1-Fc, VL1-L1-VL2-L2-VH2-L3-VH1-CH1-Fc, VH1-L1-VH2-L2-VL2-L3-VH1-CH1-Fc, VL1-L1-VL2-L2-VH2-L3-VH1-L4-CH1-Fc, VH1-L1-VH2-L2-VL2-L3-VH1-L4-CH1-Fc, VL1-L1-VL2-L2-VH2-L3-VH1-L4-CH1-L5-Fc, VH1-L1-VH2-L2-VL2-L3-VH1-L4-CH1-L5-Fc, VL1-VL2-VH2-VH1-CL-Fc, VH1-VH2-VL2-VL1-CL-Fc, VL1-L1-VL2-L2-VH2-L3-VH1-CL-Fc, VH-L1-VH2-L2-VL2-L3-VH1-CL-Fc, VL1-L1-VL2-L2-VH2-L3-VH1-L4-CL-Fc, VH1-L1-VH2-L2-VL2-L3-VH1-L4-CL-Fc, VL1-L1-VL2-L2-VH2-L3-VH1-L4-CL-L5-Fc, or VH1-L1-VH2-L2-VL2-L3-VH1-L4-CL-L5-Fc and the second polypeptide has a structure represented by VL3-VH3-CH1-Fc. In some aspects, the first polypeptide has the structure represented by VL1-VL2-VH2-VH1-CH1-Fc, VH1-VH2-VL2-VL1-CH1-Fc, VL1-L1-VL2-L2-VH2-L3-VH1-CH1-Fc, VH1-L1-VH2-L2-VL2-L3-VH1-CH1-Fc, VL1-L1-VL2-L2-VH2-L3-VH1-L4-CH1-Fc, VH1-L1-VH2-L2-VL2-L3-VH-L4-CH1-Fc, VL1-L1-VL2-L2-VH2-L3-VH1-L4-CH1-L5-Fc, VH1-L1-VH2-L2-VL2-L3-VH-L4-CH1-L5-Fc, VL1-VL2-VH2-VH1-CL-Fc, VH1-VH2-VL2-VL1-CL-Fc, VL1-L1-VL2-L2-VH2-L3-VH1-CL-Fc, VH1-L1-VH2-L2-VL2-L3-VH1-CL-Fc, VL1-L1-VL2-L2-VH2-L3-VH1-L4-CL-Fc, VH1-L1-VH2-L2-VL2-L3-VH1-L4-CL-Fc, VL1-L1-VL2-L2-VH2-L3-VH1-L4-CL-L5-Fc, or VH1-L1-VH2-L2-VL2-L3-VH1-L4-CL-L5-Fc and the second polypeptide has a structure represented by VL3-L6-VH3-L7-CH1-Fc. In some aspects, the first polypeptide has the structure represented by VL1-VL2-VH2-VH1-CH1-Fc, VH-VH2-VL2-VL1-CH1-Fc, VL1-L1-VL2-L2-VH2-L3-VH1-CH1-Fc, VH1-L1-VH2-L2-VL2-L3-VH-CH1-Fc, VL1-L1-VL2-L2-VH2-L3-VH1-L4-CH1-Fc, VH1-L1-VH2-L2-VL2-L3-VH1-L4-CH1-Fc, VL1-L1-VL2-L2-VH2-L3-VH1-L4-CH1-L5-Fc, VH1-L1-VH2-L2-VL2-L3-VH1-L4-CH1-L5-Fc, VL1-VL2-VH2-VH1-CL-Fc, VH1-VH2-VL2-VL1-CL-Fc, VL1-L1-VL2-L2-VH2-L3-VH1-CL-Fc, VH1-L1-VH2-L2-VL2-L3-VH1-CL-Fc, VL1-L1-VL2-L2-VH2-L3-VH1-L4-CL-Fc, VH1-L1-VH2-L2-VL2-L3-VH1-L4-CL-Fc, VL1-L1-VL2-L2-VH2-L3-VH1-L4-CL-L5-Fc, or VH1-L1-VH2-L2-VL2-L3-VH1-L4-CL-L5-Fc and the second polypeptide has a structure represented by VL3-L6-VH3-L7-CH1-L8-Fc. In some aspects, the first polypeptide has the structure represented by VL1-VL2-VH2-VH1-CH1-Fc, VH1-VH2-VL2-VL1-CH1-Fc, VL1-L1-VL2-L2-VH2-L3-VH1-CH1-Fc, VH1-L1-VH2-L2-VL2-L3-VH1-CH1-Fc, VL1-L1-VL2-L2-VH2-L3-VH1-L4-CH1-Fc, VH1-L1-VH2-L2-VL2-L3-VH-L4-CH1-Fc, VL1-L1-VL2-L2-VH2-L3-VH1-L4-CH1-L5-Fc, VH1-L1-VH2-L2-VL2-L3-VH-L4-CH1-L5-Fc, VL1-VL2-VH2-VH1-CL-Fc, VH1-VH2-VL2-VL1-CL-Fc, VL1-L1-VL2-L2-VH2-L3-VH1-CL-Fc, VH1-L1-VH2-L2-VL2-L3-VH1-CL-Fc, VL1-L1-VL2-L2-VH2-L3-VH1-L4-CL-Fc, VH1-L1-VH2-L2-VL2-L3-VH1-L4-CL-Fc, VL1-L1-VL2-L2-VH2-L3-VH1-L4-CL-L5-Fc, or VH1-L1-VH2-L2-VL2-L3-VH-L4-CL-L5-Fc and the second polypeptide has a structure represented by VH3-VL3-CH1-Fc. In some aspects, the first polypeptide has the structure represented by VL1-VL2-VH2-VH1-CH1-Fc, VH1-VH2-VL2-VL1-CH1-Fc, VL1-L1-VL2-L2-VH2-L3-VH1-CH1-Fc, VH1-L1-VH2-L2-VL2-L3-VH1-CH1-Fc, VL1-L1-VL2-L2-VH2-L3-VH1-L4-CH1-Fc, VH1-L1-VH2-L2-VL2-L3-VH1-L4-CH1-Fc, VL1-L1-VL2-L2-VH2-L3-VH1-L4-CH1-L5-Fc, VH1-L1-VH2-L2-VL2-L3-VH1-L4-CH-L5-Fc, VL1-VL2-VH2-VH1-CL-Fc, VH1-VH2-VL2-VL1-CL-Fc, VL1-L1-VL2-L2-VH2-L3-VH1-CL-Fc, VH1-L1-VH2-L2-VL2-L3-VH1-CL-Fc, VL1-L1-VL2-L2-VH2-L3-VH-L4-CL-Fc, VH1-L1-VH2-L2-VL2-L3-VH-L4-CL-Fc, VL1-L1-VL2-L2-VH2-L3-VH1-L4-CL-L5-Fc, or VH1-L1-VH2-L2-VL2-L3-VH1-L4-CL-L5-Fc and the second polypeptide has a structure represented by VH3-L6-VL3-L7-CH1-Fc. In some aspects, the first polypeptide has the structure represented by VL1-VL2-VH2-VH1-CH1-Fc, VH1-VH2-VL2-VL1-CH1-Fc, VL1-L1-VL2-L2-VH2-L3-VH1-CH1-Fc, VH1-L1-VH2-L2-VL2-L3-VH1-CH1-Fc, VL1-L1-VL2-L2-VH2-L3-VH1-L4-CH1-Fc, VH1-L1-VH2-L2-VL2-L3-VH1-L4-CH1-Fc, VL1-L1-VL2-L2-VH2-L3-VH1-L4-CH1-L5-Fc, VH1-L1-VH2-L2-VL2-L3-VH1-L4-CH-L5-Fc, VL1-VL2-VH2-VH1-CL-Fc, VH1-VH2-VL2-VL1-CL-Fc, VL1-L1-VL2-L2-VH2-L3-VH1-CL-Fc, VH1-L1-VH2-L2-VL2-L3-VH1-CL-Fc, VL1-L1-VL2-L2-VH2-L3-VH1-L4-CL-Fc, VH1-L1-VH2-L2-VL2-L3-VH1-L4-CL-Fc, VL1-L1-VL2-L2-VH2-L3-VH1-L4-CL-L5-Fc, or VH1-L1-VH2-L2-VL2-L3-VH1-L4-CL-L5-Fc and the second polypeptide has a structure represented by VH3-L6-VL3-L7-CH1-L8-Fc.

[0231] In another aspect, the invention is directed to an antigen binding polypeptide complex (e.g., an antibody or antigen binding fragment thereof) comprising a first polypeptide having a structure represented by VL1-VL2-VH2-VH1-CL-CH1-Fc, VL1-L1-VL2-L2-VH2-L3-VH1-CL-CH1-Fc, VL1-L1-VL2-L2-VH2-L3-VH1-L4-CL-CH1-Fc, VL1-L1-VL2-L2-VH2-L3-VH1-L4-CL-L5-CH1-Fc, VL1-L1-VL2-L2-VH2-L3-VH1-L4-CL-L5-CH1-L6-Fc, VH1-VH2-VL2-VL1-CL-CH1-Fc, VH1-L1-VH2-L2-VL2-L3-VL1-CL-CH1-Fc, VH1-L1-VH2-L2-VL2-L3-VL1-L4-CL-CH1-Fc, VH1-L1-VH2-L2-VL2-L3-VL1-L4-CL-L5-CH1-Fc, VH1-L1-VH2-L2-VL2-L3-VL1-L4-CL-L5-CH1-L6-Fe, VL1-VL2-VH2-VH1-CH1-CL-Fc, VL1-L1-VL2-L2-VH2-L3-VH1-CH1-CL-Fc, VL1-L1-VL2-L2-VH2-L3-VH1-L4-CH1-CL-Fc, VL1-L1-VL2-L2-VH2-L3-VH1-L4-CH1-L5-CL-Fc, VL1-L1-VL2-L2-VH2-L3-VH1-L4-CH1-L5-CL-L6-Fc, VH1-VH2-VL2-VL1-CH1-CL-Fc, VH1-L1-VH2-L2-VL2-L3-VL1-CH1-CL-Fc, VH1-L1-VH2-L2-VL2-L3-VL1-L4-CH1-CL-Fc, VH1-L1-VH2-L2-VL2-L3-VL1-L4-CH-L5-CL-Fc, or VH1-L1-VH2-L2-VL2-L3-VL1-L4-CH1-L5-CL-L6-Fc; and a second polypeptide having a structure represented by VL3-VH3-Fc, VL3-L7-VH3-Fc, VL3-L7-VH3-L8-Fc, VH3-VL3-Fc, VH3-L7-VL3-Fc, or VH3-L7-VL3-L8-Fc; wherein VL1 is a first immunoglobulin light chain variable region that specifically binds to an HIV protein; VL2 is a second immunoglobulin light chain variable region that specifically binds to an HIV protein; VL3 is a third immunoglobulin light chain variable region that specifically binds to an HIV protein; VH1 is a first immunoglobulin heavy chain variable region that specifically binds to an HIV protein; VH2 is a second immunoglobulin heavy chain variable region that specifically binds to an HIV protein; VH3 is a third immunoglobulin heavy chain variable region that specifically binds to an HIV protein; Fc is a region comprising an immunoglobulin heavy chain constant region 2 (CH2), an immunoglobulin heavy chain constant region 3 (CH3), and optionally, an immunoglobulin hinge; CH1 is an immunoglobulin heavy chain constant region 1; CL is an immunoglobulin light chain constant region; and L1, L2, L3, L4, L5, L6, L7 and L8 are amino acid linkers. In some aspects, the first polypeptide has the structure represented by VL1-VL2-VH2-VH1-CL-CH1-Fc, VL1-L1-VL2-L2-VH2-L3-VH1-CL-CH1-Fc, VL1-L1-VL2-L2-VH2-L3-VH1-L4-CL-CH1-Fc, VL1-L1-VL2-L2-VH2-L3-VH1-L4-CL-L5-CH1-Fc, VL1-L1-VL2-L2-VH2-L3-VH1-L4-CL-L5-CH1-L6-Fc, VH1-VH2-VL2-VL1-CL-CH1-Fc, VH1-L1-VH2-L2-VL2-L3-VL1-CL-CH1-Fc, VH1-L1-VH2-L2-VL2-L3-VL1-L4-CL-CH1-Fc, VH1-L1-VH2-L2-VL2-L3-VL1-L4-CL-L5-CH1-Fc, VH1-L1-VH2-L2-VL2-L3-VL1-L4-CL-L5-CH1-L6-Fc, VL1-VL2-VH2-VH1-CH1-CL-Fc, VL1-L1-VL2-L2-VH2-L3-VH1-CH1-CL-Fc, VL1-L1-VL2-L2-VH2-L3-VH1-L4-CH1-CL-Fc, VL1-L1-VL2-L2-VH2-L3-VH1-L4-CH1-L5-CL-Fc, VL1-L1-VL2-L2-VH2-L3-VH1-L4-CH1-L5-CL-L6-Fc, VH1-VH2-VL2-VL1-CH1-CL-Fc, VH1-L1-VH2-L2-VL2-L3-VL1-CH1-CL-Fc, VH1-L1-VH2-L2-VL2-L3-VL1-L4-CH1-CL-Fc, VH1-L1-VH2-L2-VL2-L3-VL1-L4-CH1-L5-CL-Fc, or VH1-L1-VH2-L2-VL2-L3-VL1-L4-CH1-L5-CL-L6-Fc and the second polypeptide has a structure represented by VL3-VH3-Fc. In some aspects, the first polypeptide has the structure represented by VL1-VL2-VH2-VH1-CL-CH-Fc, VL1-L1-VL2-L2-VH2-L3-VH1-CL-CH1-Fc, VL1-L1-VL2-L2-VH2-L3-VH1-L4-CL-CH1-Fc, VL1-L1-VL2-L2-VH2-L3-VH1-L4-CL-L5-CH1-Fc, VL1-L1-VL2-L2-VH2-L3-VH1-L4-CL-L5-CH1-L6-Fc, VH1-VH2-VL2-VL1-CL-CH1-Fc, VH1-L1-VH2-L2-VL2-L3-VL1-CL-CH1-Fc, VH1-L1-VH2-L2-VL2-L3-VL1-L4-CL-CH1-Fc, VH1-L1-VH2-L2-VL2-L3-VL1-L4-CL-L5-CH1-Fc, VH1-L1-VH2-L2-VL2-L3-VL1-L4-CL-L5-CH1-L6-Fc, VL1-VL2-VH2-VH1-CH1-CL-Fc, VL1-L1-VL2-L2-VH2-L3-VH1-CH1-CL-Fc, VL1-L1-VL2-L2-VH2-L3-VH1-L4-CH1-CL-Fc, VL1-L1-VL2-L2-VH2-L3-VH1-L4-CH1-L5-CL-Fc, VL1-L1-VL2-L2-VH2-L3-VH1-L4-CH1-L5-CL-L6-Fe, VH11-VH2-VL2-VL1-CH1-CL-Fc, VH1-L1-VH2-L2-VL2-L3-VL1-CH1-CL-Fc, VH1-L1-VH2-L2-VL2-L3-VL1-L4-CH1-CL-Fc, VH1-L1-VH2-L2-VL2-L3-VL1-L4-CH1-L5-CL-Fc, or VH1-L1-VH2-L2-VL2-L3-VL1-L4-CH1-L5-CL-L6-Fc and the second polypeptide has a structure represented by VL3-L7-VH3-Fc. In some aspects, the first polypeptide has the structure represented by VL1-VL2-VH2-VH1-CL-CH1-Fc, VL1-L1-VL2-L2-VH2-L3-VH1-CL-CH1-Fc, VL1-L1-VL2-L2-VH2-L3-VH1-L4-CL-CH1-Fc, VL1-L1-VL2-L2-VH2-L3-VH1-L4-CL-L5-CH1-Fc, VL1-L1-VL2-L2-VH2-L3-VH1-L4-CL-L5-CH1-L6-Fc, VH1-VH2-VL2-VL1-CL-CH1-Fc, VH1-L1-VH2-L2-VL2-L3-VL1-CL-CH1-Fc, VH1-L1-VH2-L2-VL2-L3-VL1-L4-CL-CH1-Fc, VH1-L1-VH2-L2-VL2-L3-VL1-L4-CL-L5-CH1-Fc, VH1-L1-VH2-L2-VL2-L3-VL1-L4-CL-L5-CH1-L6-Fc, VL1-VL2-VH2-VH-CH1-CL-Fc, VL1-L1-VL2-L2-VH2-L3-VH1-CH1-CL-Fc, VL1-L1-VL2-L2-VH2-L3-VH1-L4-CH1-CL-Fc, VL1-L1-VL2-L2-VH2-L3-VH1-L4-CH1-L5-CL-Fe, VL1-L1-VL2-L2-VH2-L3-VH1-L4-CH-L5-CL-L6-Fc, VH1-VH2-VL2-VL1-CH1-CL-Fc, VH1-L1-VH2-L2-VL2-L3-VL1-CH1-CL-Fc, VH1-L1-VH2-L2-VL2-L3-VL1-L4-CH1-CL-Fc, VH1-L1-VH2-L2-VL2-L3-VL1-L4-CH1-L5-CL-Fc, or VH1-L1-VH2-L2-VL2-L3-VL1-L4-CH1-L5-CL-L6-Fc and the second polypeptide has a structure represented by VL3-L7-VH3-L8-Fe. In some aspects, the first polypeptide has the structure represented by VL1-VL2-VH2-VH1-CL-CH1-Fc, VL1-L1-VL2-L2-VH2-L3-VH-CL-CH1-Fc, VL1-L1-VL2-L2-VH2-L3-VH-L4-CL-CH1-Fc, VL1-L1-VL2-L2-VH2-L3-VH1-L4-CL-L5-CH1-Fc, VL1-L1-VL2-L2-VH2-L3-VH1-L4-CL-L5-CH1-L6-Fc, VH1-VH2-VL2-VL1-CL-CH1-Fc, VH1-L1-VH2-L2-VL2-L3-VL1-CL-CH1-Fc, VH1-L1-VH2-L2-VL2-L3-VL1-L4-CL-CH1-Fc, VH1-L1-VH2-L2-VL2-L3-VL1-L4-CL-L5-CH1-Fc, VH1-L1-VH2-L2-VL2-L3-VL1-L4-CL-L5-CH1-L6-Fc, VL1-VL2-VH2-VH1-CH1-CL-Fc, VL1-L1-VL2-L2-VH2-L3-VH1-CH1-CL-Fc, VL1-L1-VL2-L2-VH2-L3-VH1-L4-CH1-CL-Fc, VL1-L1-VL2-L2-VH2-L3-VH1-L4-CH1-L5-CL-Fc, VL1-L1-VL2-L2-VH2-L3-VH1-L4-CH1-L5-CL-L6-Fe, VH1-VH2-VL2-VL1-CH1-CL-Fc, VH1-L1-VH2-L2-VL2-L3-VL1-CH1-CL-Fc, VH1-L1-VH2-L2-VL2-L3-VL1-L4-CH1-CL-Fc, VH1-L1-VH2-L2-VL2-L3-VL1-L4-CH1-L5-CL-Fc, or VH1-L1-VH2-L2-VL2-L3-VL1-L4-CH-L5-CL-L6-Fc and the second polypeptide has a structure represented by VH3-VL3-Fc. In some aspects, the first polypeptide has the structure represented by VL1-VL2-VH2-VH1-CL-CH1-Fc, VL1-L1-VL2-L2-VH2-L3-VH1-CL-CH1-Fc, VL1-L1-VL2-L2-VH2-L3-VH-L4-CL-CH1-Fc, VL1-L1-VL2-L2-VH2-L3-VH1-L4-CL-L5-CH1-Fc, VL1-L1-VL2-L2-VH2-L3-VH1-L4-CL-L5-CH1-L6-Fc, VH1-VH2-VL2-VL1-CL-CH1-Fc, VH1-L1-VH2-L2-VL2-L3-VL1-CL-CH1-Fc, VH1-L1-VH2-L2-VL2-L3-VL1-L4-CL-CH1-Fc, VH1-L1-VH2-L2-VL2-L3-VL1-L4-CL-L5-CH1-Fc, VH1-L1-VH2-L2-VL2-L3-VL1-L4-CL-L5-CH1-L6-Fc, VL1-VL2-VH2-VH1-CH1-CL-Fc, VL1-L1-VL2-L2-VH2-L3-VH1-CH1-CL-Fe, VL1-L1-VL2-L2-VH2-L3-VH1-L4-CH1-CL-Fc, VL1-L1-VL2-L2-VH2-L3-VH1-L4-CH1-L5-CL-Fc, VL1-L1-VL2-L2-VH2-L3-VH1-L4-CH1-L5-CL-L6-Fc, VH1-VH2-VL2-VL1-CH1-CL-Fc, VH1-L1-VH2-L2-VL2-L3-VL1-CH1-CL-Fc, VH1-L1-VH2-L2-VL2-L3-VL1-L4-CH1-CL-Fc, VH1-L1-VH2-L2-VL2-L3-VL1-L4-CH1-L5-CL-Fc, or VH1-L1-VH2-L2-VL2-L3-VL1-L4-CH1-L5-CL-L6-Fc and the second polypeptide has a structure represented by VH3-L7-VL3-Fc. In some aspects, the first polypeptide has the structure represented by VL1-VL2-VH2-VH1-CL-CH1-Fc, VL1-L1-VL2-L2-VH2-L3-VH1-CL-CH1-Fc, VL1-L1-VL2-L2-VH2-L3-VH1-L4-CL-CH1-Fc, VL1-L1-VL2-L2-VH2-L3-VH1-L4-CL-L5-CH1-Fc, VL1-L1-VL2-L2-VH2-L3-VH1-L4-CL-L5-CH1-L6-Fc, VH1-VH2-VL2-VL1-CL-CH1-Fe, VH1-L1-VH2-L2-VL2-L3-VL1-CL-CH1-Fc, VH1-L1-VH2-L2-VL2-L3-VL1-L4-CL-CH1-Fc, VH1-L1-VH2-L2-VL2-L3-VL1-L4-CL-L5-CH1-Fc, VH1-L1-VH2-L2-VL2-L3-VL1-L4-CL-L5-CH-L6-Fc, VL1-VL2-VH2-VH1-CH1-CL-Fc, VL1-L1-VL2-L2-VH2-L3-VH1-CH1-CL-Fc, VL1-L1-VL2-L2-VH2-L3-VH1-L4-CH1-CL-Fc, VL1-L1-VL2-L2-VH2-L3-VH1-L4-CH1-L5-CL-Fc, VL1-L1-VL2-L2-VH2-L3-VH1-L4-CH1-L5-CL-L6-Fc, VH1-VH2-VL2-VL1-CH1-CL-Fc, VH1-L1-VH2-L2-VL2-L3-VL1-CH1-CL-Fc, VH1-L1-VH2-L2-VL2-L3-VL1-L4-CH1-CL-Fc, VH1-L1-VH2-L2-VL2-L3-VL1-L4-CH1-L5-CL-Fc, or VH1-L1-VH2-L2-VL2-L3-VL1-L4-CH1-L5-CL-L6-Fc and the second polypeptide has a structure represented by VH3-L7-VL3-L8-Fc.

[0232] In some aspects, one or more of VH1, VH2 and VH3 of an antigen binding polypeptide complex described herein can specifically bind to the same antigen or different antigens. In another aspect, one or more of VL1, VL2 and VL3 of an antigen binding polypeptide complex described herein can specifically bind to the same antigen or different antigens.

[0233] In some aspects of an antigen binding polypeptide complex of the invention, VH1, VH2 and VH3 each comprise a heavy chain variable region from the PGT121, VRC01, 10E8v4 or PG16 antibody or a variant thereof; and/or VL1, VL2 and VL3 each comprise a light chain variable region from the PGT121, VRC01, 10E8v4 or PG16 antibody or a variant thereof.

[0234] In some aspects, antigen binding polypeptides or antigen binding polypeptide complexes comprise VH and VL sequences from broadly neutralizing antibodies that target CD4bs inclusive of VRC01, VRC03, 3BNC117, N6, N49P7, 3BNC60, VRC-PG04, VRC-PG20, NIH45-46, VRC-CH31, 12A12, CH103, 8ANC131, VRC13 and VRC16.

[0235] In some aspects, the VH of an antigen binding polypeptide or antigen binding polypeptide complex of the invention may comprise an amino acid sequence having at least 90% identity, at least 95% identity or 100% identity to any one of SEQ ID NOs:327, 328, 329 and 330; and/or the VL of an antigen binding polypeptide or antigen binding polypeptide complex of the invention may comprise an amino acid sequence having at least 90% identity, at least 95% identity or 100% identity to any one of SEQ ID NOs:331, 332, 333 and 334. For example, the VH of an antigen binding polypeptide or antigen binding polypeptide complex of the invention may comprise an amino acid sequence having at least 90% identity, at least 95% identity or 100% identity to SEQ ID NO:327; and the VL of an antigen binding polypeptide or antigen binding polypeptide complex of the invention may comprise an amino acid sequence having at least 90% identity, at least 95% identity or 100% identity to SEQ ID NO:331. For example, the VH of an antigen binding polypeptide or antigen binding polypeptide complex of the invention may comprise an amino acid sequence having at least 90% identity, at least 95% identity or 100% identity to SEQ ID NO:328; and the VL of an antigen binding polypeptide or antigen binding polypeptide complex of the invention may comprise an amino acid sequence having at least 90% identity, at least 95% identity or 100% identity to SEQ ID NO:332. For example, the VH of an antigen binding polypeptide or antigen binding polypeptide complex of the invention may comprise an amino acid sequence having at least 90% identity, at least 95% identity or 100% identity to SEQ ID NO:330; and the VL of an antigen binding polypeptide or antigen binding polypeptide complex of the invention may comprise an amino acid sequence having at least 90% identity, at least 95% identity or 100% identity to SEQ ID NO:334. For example, the VH of an antigen binding polypeptide or antigen binding polypeptide complex of the invention may comprise an amino acid sequence having at least 90% identity, at least 95% identity or 100% identity to SEQ ID NO:329; and the VL of an antigen binding polypeptide or antigen binding polypeptide complex of the invention may comprise an amino acid sequence having at least 90% identity, at least 95% identity or 100% identity to SEQ ID NO:333.

[0236] In some aspects, the heavy chain CDR1 of an antigen binding polypeptide or antigen binding polypeptide complex of the invention comprises an amino acid sequence having at least 90% identity, at least 95% identity or 100% identity to any one of SEQ ID NOs:335, 338, 341 and 344; the heavy chain CDR2 of an antigen binding polypeptide or antigen binding polypeptide complex of the invention comprises an amino acid sequence having at least 90% identity, at least 95% identity or 100% identity to any one of SEQ ID NOs:336, 339, 342 and 345; the heavy chain CDR3 of an antigen binding polypeptide or antigen binding polypeptide complex of the invention comprises an amino acid sequence having at least 90% identity, at least 95% identity or 100% identity to any one of SEQ ID NOs:337, 340, 343 and 346; the light chain CDR1 of an antigen binding polypeptide or antigen binding polypeptide complex of the invention comprises an amino acid sequence having at least 90% identity, at least 95% identity or 100% identity to any one of SEQ ID NOs:347, 350, 353 and 356; the light chain CDR2 of an antigen binding polypeptide or antigen binding polypeptide complex of the invention comprises an amino acid sequence having at least 90% identity, at least 95% identity or 100% identity to any one of SEQ ID NOs:348, 351, 353 and 357; and/or the light chain CDR3 of an antigen binding polypeptide or antigen binding polypeptide complex of the invention comprises an amino acid sequence having at least 90% identity, at least 95% identity or 100% identity to any one of SEQ ID NOs:349, 352, 355 and 358. For example, the heavy chain CDR1 of an antigen binding polypeptide or antigen binding polypeptide complex of the invention comprises an amino acid sequence having at least 90% identity (such as at least 91%, 92%, 93%, 94%, 95%, 96%, 97%, 98%, or 99% identity) to any one of SEQ ID NOs:335, 338, 341 and 344; the heavy chain CDR2 of an antigen binding polypeptide or antigen binding polypeptide complex of the invention comprises an amino acid sequence having at least 90% identity (such as at least 91%, 92%, 93%, 94%, 95%, 96%, 97%, 98%, or 99% identity) to any one of SEQ ID NOs:336, 339, 342 and 345; the heavy chain CDR3 of an antigen binding polypeptide or antigen binding polypeptide complex of the invention comprises an amino acid sequence having at least 90% identity (such as at least 91%, 92%, 93%, 94%, 95%, 96%, 97%, 98%, or 99% identity) to any one of SEQ ID NOs:337, 340, 343 and 346; the light chain CDR1 of an antigen binding polypeptide or antigen binding polypeptide complex of the invention comprises an amino acid sequence having at least 90% identity (such as at least 91%, 92%, 93%, 94%, 95%, 96%, 97%, 98%, or 99% identity) to any one of SEQ ID NOs:347, 350, 353 and 356; the light chain CDR2 of an antigen binding polypeptide or antigen binding polypeptide complex of the invention comprises an amino acid sequence having at least 90% identity (such as at least 91%, 92%, 93%, 94%, 95%, 96%, 97%, 98%, or 99% identity) to any one of SEQ ID NOs:348, 351, 354 and 357; and/or the light chain CDR3 of an antigen binding polypeptide or antigen binding polypeptide complex of the invention comprises an amino acid sequence having at least 90% identity (such as at least 91%, 92%, 93%, 94%, 95%, 96%, 97%, 98%, or 99% identity) to any one of SEQ ID NOs:349, 352, 355 and 358. For example, the heavy chain CDR1 of an antigen binding polypeptide or antigen binding polypeptide complex of the invention comprises the amino acid sequence of any one of SEQ ID NOs:335, 338, 341 and 344; the heavy chain CDR2 of an antigen binding polypeptide or antigen binding polypeptide complex of the invention comprises the amino acid sequence of any one of SEQ ID NOs:336, 339, 342 and 345; the heavy chain CDR3 of an antigen binding polypeptide or antigen binding polypeptide complex of the invention comprises the amino acid sequence of any one of SEQ ID NOs:337, 340, 343 and 346; the light chain CDR1 of an antigen binding polypeptide or antigen binding polypeptide complex of the invention comprises the amino acid sequence of any one of SEQ ID NOs:347, 350, 353 and 356; the light chain CDR2 of an antigen binding polypeptide or antigen binding polypeptide complex of the invention comprises the amino acid sequence of any one of SEQ ID NOs:348, 351, 354 and 357; and/or the light chain CDR3 of an antigen binding polypeptide or antigen binding polypeptide complex of the invention comprises the amino acid sequence of any one of SEQ ID NOs:349, 352, 355 and 358. For example, the heavy chain CDR1 of an antigen binding polypeptide or antigen binding polypeptide complex of the invention comprises the amino acid sequence of any one of SEQ ID NOs:335, 338, 341 and 344; the heavy chain CDR2 of an antigen binding polypeptide or antigen binding polypeptide complex of the invention comprises the amino acid sequence of any one of SEQ ID NOs:336, 339, 342 and 345; and the heavy chain CDR3 of an antigen binding polypeptide or antigen binding polypeptide complex of the invention comprises the amino acid sequence of any one of SEQ ID NOs:337, 340, 343 and 346. For example, the light chain CDR1 of an antigen binding polypeptide or antigen binding polypeptide complex of the invention comprises the amino acid sequence of any one of SEQ ID NOs:347, 350, 353 and 356; the light chain CDR2 of an antigen binding polypeptide or antigen binding polypeptide complex of the invention comprises the amino acid sequence of any one of SEQ ID NOs:348, 351, 354 and 357; and the light chain CDR3 of an antigen binding polypeptide or antigen binding polypeptide complex of the invention comprises the amino acid sequence of any one of SEQ ID NOs:349, 352, 355 and 358. For example, the heavy chain CDR1 of an antigen binding polypeptide or antigen binding polypeptide complex of the invention comprises the amino acid sequence of any one of SEQ ID NOs:335, 338, 341 and 344; the heavy chain CDR2 of an antigen binding polypeptide or antigen binding polypeptide complex of the invention comprises the amino acid sequence of any one of SEQ ID NOs:336, 339, 342 and 345; the heavy chain CDR3 of an antigen binding polypeptide or antigen binding polypeptide complex of the invention comprises the amino acid sequence of any one of SEQ ID NOs:337, 340, 343 and 346; the light chain CDR1 of an antigen binding polypeptide or antigen binding polypeptide complex of the invention comprises the amino acid sequence of any one of SEQ ID NOs:347, 350, 353 and 356; the light chain CDR2 of an antigen binding polypeptide or antigen binding polypeptide complex of the invention comprises the amino acid sequence of any one of SEQ ID NOs:348, 351, 354 and 357; and the light chain CDR3 of an antigen binding polypeptide or antigen binding polypeptide complex of the invention comprises the amino acid sequence of any one of SEQ ID NOs:349, 352, 355 and 358. For example, the heavy chain CDR1 of an antigen binding polypeptide or antigen binding polypeptide complex of the invention comprises the amino acid sequence of SEQ ID NO:335; the heavy chain CDR2 of an antigen binding polypeptide or antigen binding polypeptide complex of the invention comprises the amino acid sequence of SEQ ID NO:336; the heavy chain CDR3 of an antigen binding polypeptide or antigen binding polypeptide complex of the invention comprises the amino acid sequence of SEQ ID NO:337; the light chain CDR1 of an antigen binding polypeptide or antigen binding polypeptide complex of the invention comprises the amino acid sequence of SEQ ID NO:350; the light chain CDR2 of an antigen binding polypeptide or antigen binding polypeptide complex of the invention comprises the amino acid sequence of SEQ ID NO:351; and the light chain CDR3 of an antigen binding polypeptide or antigen binding polypeptide complex of the invention comprises the amino acid sequence of SEQ ID NO:352. For example, the heavy chain CDR1 of an antigen binding polypeptide or antigen binding polypeptide complex of the invention comprises the amino acid sequence of SEQ ID NO:338; the heavy chain CDR2 of an antigen binding polypeptide or antigen binding polypeptide complex of the invention comprises the amino acid sequence of SEQ ID NO:339; the heavy chain CDR3 of an antigen binding polypeptide or antigen binding polypeptide complex of the invention comprises the amino acid sequence of SEQ ID NO:340; the light chain CDR1 of an antigen binding polypeptide or antigen binding polypeptide complex of the invention comprises the amino acid sequence of SEQ ID NO:353; the light chain CDR2 of an antigen binding polypeptide or antigen binding polypeptide complex of the invention comprises the amino acid sequence of SEQ ID NO:354; and the light chain CDR3 of an antigen binding polypeptide or antigen binding polypeptide complex of the invention comprises the amino acid sequence of SEQ ID NO:355. For example, the heavy chain CDR1 of an antigen binding polypeptide or antigen binding polypeptide complex of the invention comprises the amino acid sequence of SEQ ID NO:341; the heavy chain CDR2 of an antigen binding polypeptide or antigen binding polypeptide complex of the invention comprises the amino acid sequence of SEQ ID NO:342; the heavy chain CDR3 of an antigen binding polypeptide or antigen binding polypeptide complex of the invention comprises the amino acid sequence of SEQ ID NO:343; the light chain CDR1 of an antigen binding polypeptide or antigen binding polypeptide complex of the invention comprises the amino acid sequence of SEQ ID NO:356; the light chain CDR2 of an antigen binding polypeptide or antigen binding polypeptide complex of the invention comprises the amino acid sequence of SEQ ID NO:357; and the light chain CDR3 of an antigen binding polypeptide or antigen binding polypeptide complex of the invention comprises the amino acid sequence of SEQ ID NO:358. For example, the heavy chain CDR1 of an antigen binding polypeptide or antigen binding polypeptide complex of the invention comprises the amino acid sequence of SEQ ID NO:344; the heavy chain CDR2 of an antigen binding polypeptide or antigen binding polypeptide complex of the invention comprises the amino acid sequence of SEQ ID NO:345; the heavy chain CDR3 of an antigen binding polypeptide or antigen binding polypeptide complex of the invention comprises the amino acid sequence of SEQ ID NO:346; the light chain CDR1 of an antigen binding polypeptide or antigen binding polypeptide complex of the invention comprises the amino acid sequence of SEQ ID NO:347; the light chain CDR2 of an antigen binding polypeptide or antigen binding polypeptide complex of the invention comprises the amino acid sequence of SEQ ID NO:348; and the light chain CDR3 of an antigen binding polypeptide or antigen binding polypeptide complex of the invention comprises the amino acid sequence of SEQ ID NO:349.

[0237] In some aspects, VH1, VH2 and VH3 of an antigen binding polypeptide complex of the invention each comprise an amino acid sequence having at least 90% identity, at least 95% identity or 100% identity to any one of SEQ ID NOs:327-330; and/or VL1, VL2 and VL3 each comprise an amino acid sequence having at least 90% identity, at least 95% identity or 100% identity to any one of SEQ ID NOs:331-334. For example, VH1, VH2 and VH3 may comprise an amino acid sequence having at least 90% identity to any one of SEQ ID NOs: 327-330; and/or VL1, VL2 and VL3 may comprise an amino acid sequence having at least 90% identity to any one of SEQ ID NOs:331-334. At least 90% identity may include at least 91%, 92%, 93%, 94%, 95%, 96%, 97%, 98%, 99% or 100% identity to the reference polypeptide sequence. For example, VH1, VH2 and VH3 may comprise the amino acid sequence of SEQ ID NOs: 327-330; and/or VL1, VL2 and VL3 may comprise the amino acid sequence of SEQ ID NOs:331-334.

[0238] In another aspect, VH1, VH2 and VH3 of an antigen binding polypeptide complex of the invention each comprise a CDR1 having an amino acid sequence with at least 90% identity, at least 95% identity or 100% identity to any one of SEQ ID NOs:335, 338, 341 and 344; a CDR2 having an amino acid sequence with at least 90% identity, at least 95% identity or 100% identity to any one of SEQ ID NOs:336, 339, 342 and 345; and a CDR3 having an amino acid sequence with at least 90% identity, at least 95% identity or 100% identity to any one of SEQ ID NOs:337, 340, 343 and 346; and VL1, VL2 and VL3 each comprise a CDR1 having an amino acid sequence with at least 90% identity, at least 95% identity or 100% identity to any one of SEQ ID NOs:347, 350, 353 and 356; a CDR2 having an amino acid sequence with at least 90% identity, at least 95% identity or 100% identity to any one of SEQ ID NOs:348, 351, 354 and 357; and a CDR3 having an amino acid sequence with at least 90% identity, at least 95% identity or 100% identity to any one of SEQ ID NOs:349, 352, 355 and 358. For example, VH1, VH2, and VH3 may comprise a CDR1 comprising an amino acid sequence having at least 90% identity to SEQ ID NOs: 335, 338, 341 and 344; CDR2 comprising an amino acid sequence having at least 90% identity to SEQ ID NOs:336, 339, 342 and 345; and/or SEQ ID NOs:337, 340, 343 and 346; and VL1, VL2 and VL3 may comprise a CDR1 comprising an amino acid sequence having at least 90% identity to SEQ ID NOs: 347, 350, 353 and 356; CDR2 comprising an amino acid sequence having at least 90% identity to SEQ ID NOs:348, 351, 354 and 357; and/or CDR3 comprising an amino acid sequence having at least 90% identity to SEQ ID NOs:349, 352, 355 and 358. At least 90% identity may include at least 91%, 92%, 93%, 94%, 95%, 96%, 97%, 98%, 99% or 100% identity to the reference polypeptide sequence. For example, VH1, VH2, and VH3 may comprise a CDR1 comprising the amino acid sequence of SEQ ID NOs: 335, 338, 341 and 344; CDR2 comprising the amino acid sequence of SEQ ID NOs:336, 339, 342 and 345; and/or SEQ ID NOs:337, 340, 343 and 346; and VL1, VL2 and VL3 may comprise a CDR1 comprising the amino acid sequence of SEQ ID NOs: 347, 350, 353 and 356; CDR2 comprising the amino acid sequence of SEQ ID NOs:348, 351, 354 and 357; and/or CDR3 comprising the amino acid sequence of SEQ ID NOs:349, 352, 355 and 358.

[0239] In some aspects, an antigen binding polypeptide or antigen binding polypeptide complex (e.g., an antibody or antigen binding fragment thereof) comprises an immunoglobulin hinge. In some aspects, the immunoglobulin hinge comprises an upper hinge region, a middle hinge region, a lower hinge region, or a combination thereof.

[0240] As used herein, an antigen binding polypeptide, antigen binding polypeptide complex (e.g., an antibody or antigen binding fragment thereof), or region or domain thereof that “specifically binds” refers to its association with an epitope by its antigen binding domain, and that the binding entails some complementarity between the antigen binding domain and the epitope. Specific binding to an epitope occurs where there is binding to that epitope via its antigen binding domain more readily than there would be binding to a random, unrelated epitope.

[0241] As used herein, an “epitope” refers to a localized region of an antigen to which an antigen binding polypeptide or antigen binding polypeptide complex (e.g., antibody or antigen binding fragment thereof) can specifically bind. An epitope can be, for example, contiguous amino acids of a polypeptide (linear or contiguous epitope) or an epitope can, for example, come together from two or more non-contiguous regions of a polypeptide or polypeptides (conformational, non-linear, discontinuous, or non-contiguous epitope). In some aspects, the epitope to which an antibody or antigen-binding fragment thereof binds can be determined by, e.g., NMR spectroscopy, X-ray diffraction crystallography studies, ELISA assays, hydrogen/deuterium exchange coupled with mass spectrometry (e.g., liquid chromatography electrospray mass spectrometry), array-based oligo-peptide scanning assays, and/or mutagenesis mapping (e.g., site-directed mutagenesis mapping). See, e.g., Giegd R et al., (1994) Acta Crystallogr D Biol Crystallogr 50(Pt 4): 339-350; McPherson A (1990) Eur J Biochem 189: 1-23; Chayen N E (1997) Structure 5: 1269-1274; McPherson A (1976) J Biol Chem 251: 6300-6303; Meth Enzymol (1985) volumes 114 & 115, eds Wyckoff H W et al., U.S. Pub. No. 2004/0014194), Bricogne G (1993) Acta Crystallogr D Biol Crystallogr 49(Pt 1): 37-60, Bricogne G (1997) Meth Enzymol 276A: 361-423, ed Carter CW, and Roversi et al., (2000) Acta Crystallogr D Biol Crystallogr 56(Pt 10): 1316-1323 (X-ray diffraction crystallography studies); and Champe et al., (1995) J Biol Chem 270: 1388-1394 and Cunningham BC & Wells JA (1989) Science 244: 1081-1085 (mutagenesis mapping).

[0242] Specific binding can be represented by a “binding affinity.” Binding affinity refers to an intrinsic binding affinity which reflects a 1:1 interaction between members of a binding pair (e.g., an antigen binding polypeptide or antigen binding polypeptide complex and an antigen). Binding affinity can be measured and/or expressed in several ways known in the art, including, but not limited to, equilibrium dissociation constant (K_{D}). K_{D} is calculated from the quotient of k_{off}/kₒₙ, where kₒₙ refers to the association rate constant of, e.g., an antigen binding polypeptide or antigen binding polypeptide complex to an antigen, and k_{off} refers to the dissociation of, e.g., an antigen binding polypeptide or antigen binding polypeptide complex from an antigen. The kₒₙ and k_{off} can be determined by techniques known to one of ordinary skill in the art, such as Octet BLI, BIAcore® or KinExA.

[0243] Accordingly, in some aspects, an antigen binding polypeptide complex of the invention is an antibody or antigen binding fragment thereof. In some aspects, the antibody or antigen binding fragment thereof comprises one, two, three or four antigen binding polypeptides described herein.

[0244] In some aspects, the antibody or antigen binding fragment thereof specifically binds to an antigen with an equilibrium dissociation constant (K_{D}) of from about 10 PM to about 1 μM. In another aspect, the antibody is IgG, IgM, IgE, IgA or IgD. For example, the antibody may be IgG. For example, the antibody may be IgM. For example, the antibody may be IgE. For example, the antibody may be IgA. For example, the antibody may be IgD. In another aspect, the IgG is IgG1, IgG2, IgG3 or IgG4. For example, the antibody may be IgG1. For example, the antibody may be IgG2. For example, the antibody may be IgG3. For example, the antibody may be IgG4. In another aspect, the antigen binding fragment is a Fab, scFab, Fab′, F(ab)₂, Fv or scFv. For example, the antigen binding fragment may be a Fab. For example, the antigen binding fragment may be a scFab. For example, the antigen binding fragment may be a Fab′. For example, the antigen binding fragment may be a F(ab′)₂. For example, the antigen binding fragment may be a Fv. For example, the antigen binding fragment may be a scFv. In yet another aspect, the antibody is human or humanized. For example, the antibody may be human. For the example, the antibody may be humanized.

[0245] In another aspect, an antigen binding polypeptide or antigen binding polypeptide complex of the invention (e.g., an antibody or antigen binding fragment thereof) is bivalent, trivalent, tetravalent, pentavalent or hexavalent.

### Amino Acid Linkers

[0246] In some aspects, an antigen binding polypeptide or antigen binding polypeptide complex (e.g., an antibody or antigen binding fragment thereof) of the invention comprises one or more amino acid linkers between one or more regions of the antigen binding polypeptide or antigen binding polypeptide complex.

[0247] As used herein, an “amino acid linker” refers to a single amino acid or short amino acid sequence that is capable of joining two polypeptide regions of the invention described herein in a stable manner that maintains or promotes a function associated with the polypeptide regions. In some aspects, an amino acid linker is represented herein in a structure of an antigen binding polypeptide or antigen binding polypeptide complex by the abbreviation “I” or “L” and a number (e.g., L1 to denote a first linker, L2 to denote a second linker, L3 to denote a third linker, L4 to denote a fourth linker, L5 to denote a fifth linker, L6 to denote a sixth linker, L7 to denote a seventh linker, L8 to denote an eighth linker, L9 to denote an ninth linker, L10 to denote a tenth linker, L11 to denote an eleventh linker and L12 to denote a twelfth linker). In some aspects, such enumerated amino acid linkers (e.g., L1) can have the same or different sequence as any other enumerated amino acid linker (e.g., L2, etc.). Furthermore, in other aspects, an enumerated amino acid linker present in one polypeptide (e.g., L1 on a first polypeptide of an antigen binding polypeptide and/or antigen binding polypeptide complex structure described herein) can have the same or different sequence as the same enumerated amino acid linker present in another polypeptide (e.g., L1 on a second polypeptide, third polypeptide, etc. of an antigen binding polypeptide and/or antigen binding polypeptide complex structure described herein).

[0248] In some aspects, an amino acid linker has a length of from about 1 amino acid to about 50 amino acids (e.g., one or more of L1, L2, L3, L4, L5, L6, L7, L8, L9, L10, L11, L12 etc. of an antigen binding polypeptide or a first, second, third, etc. polypeptide of an antigen binding polypeptide complex structure described herein). In another aspect, the amino acid linker has a length of from about 1 amino acid to about 45 amino acids, about 1 amino acid to about 40 amino acids, about 1 amino acid to about 35 amino acids, about 1 amino acid to about 30 amino acids, about 1 amino acid to about 25 amino acids, about 1 amino acid to about 20 amino acids, 1 amino acid to about 15 amino acids, about 1 amino acid to about 10 amino acids, about 1 amino acid to about 5 amino acids, about 5 amino acids to about 50 amino acids, about 5 amino acids to about 45 amino acids, about 5 amino acids to about 40 amino acids, about 5 amino acids to about 35 amino acids, about 5 amino acids to about 30 amino acids, about 5 amino acids to about 25 amino acids, about 5 amino acids to about 20 amino acids, about 5 amino acids to about 15 amino acids, about 5 amino acids to about 10 amino acids, about 10 amino acids to about 50 amino acids, about 10 amino acids to about 45 amino acids, about 10 amino acids to about 40 amino acids, about 10 amino acids to about 35 amino acids, about 10 amino acids to about 30 amino acids, about 10 amino acids to about 25 amino acids, about 10 amino acids to about 20 amino acids, about 10 amino acids to about 15 amino acids, about 15 amino acids to about 50 amino acids, about 15 amino acids to about 45 amino acids, about 15 amino acids to about 40 amino acids, about 15 amino acids to about 35 amino acids, about 15 amino acids to about 30 amino acids, about 15 amino acids to about 25 amino acids, about 15 amino acids to about 20 amino acids, about 20 amino acids to about 50 amino acids, about 20 amino acids to about 45 amino acids, about 20 amino acids to about 40 amino acids, about 20 amino acids to about 35 amino acids, about 20 amino acids to about 30 amino acids, about 20 amino acids to about 25 amino acids, about 25 amino acids to about 50 amino acids, about 25 amino acids to about 45 amino acids, about 25 amino acids to about 40 amino acids, about 25 amino acids to about 35 amino acids, about 25 amino acids to about 30 amino acids, about 30 amino acids to about 50 amino acids, about 30 amino acids to about 45 amino acids, about 30 amino acids to about 40 amino acids, about 30 amino acids to about 35 amino acids, about 40 amino acids to about 50 amino acids, about 40 amino acids to about 45 amino acids, or about 45 amino acids to about 50 amino acids.

[0249] In another aspect, the amino acid linker has about 1, about 2, about 3, about 4, about 5, about 6, about 7, about 8, about 9, about 10, about 11, about 12, about 13, about 14, about 15, about 16, about 17, about 18, about 19, about 20, about 25, about 30, about 35, about 40, about 45, or about 50 amino acids (e.g., one or more of L1, L2, L3, L4, L5, L6, L7, L8, L9, L10, L11, L12 etc. of an antigen binding polypeptide structure described herein or a first, second, third, etc. polypeptide of an antigen binding polypeptide complex structure described herein).

[0250] In some aspects, the amino acid linker consists of one or more amino acid residues (e.g., one or more of L1, L2, L3, L4, L5, L6, L7, L8, L9, L10, L11, L12 etc. of an antigen binding polypeptide structure described herein or a first, second, third, etc. polypeptide of an antigen binding polypeptide complex structure described herein). In some aspects, the amino acid residues are selected from the group consisting of glycine, alanine, serine, threonine, cysteine, asparagine, glutamine, leucine, isoleucine, valine, proline, histidine, aspartic acid, glutamic acid, lysine, arginine, methionine, phenylalanine, tryptophan, and tyrosine.

[0251] In some aspects, an amino acid linker of the invention is non-immunogenic. In some aspects, the non-immunogenic linker consists of serine, glycine and/or alanine residues, or consists of serine and/or glycine residues. In another aspect, an amino acid linker of the invention does not contain a T cell epitope or consensus T cell epitope.

[0252] In some aspects, the amino acid linker consists of one or more residues of alanine, cysteine, glycine, isoleucine, leucine, methionine, phenylalanine, proline, tryptophan, tyrosine, valine (e.g., one or more of L1, L2, L3, L4, L5, L6, L7, L8, L9, L10, L11, L12 etc. of an antigen binding polypeptide structure described herein or a first, second, third, etc. polypeptide of an antigen binding polypeptide complex structure described herein).

[0253] Amino acid linker sequences that can be used with the antigen binding polypeptides and antigen binding polypeptide complexes (e.g., an antibody or antigen binding fragment thereof) of the invention are well known and can be incorporated into antigen binding polypeptides and antigen binding polypeptide complexes of the invention using routine molecular biology and recombinant DNA techniques. See, e.g., Chen et al., Adv Drug Deliv Rev., 65(10):1357-1369, 2013; and Chichili et al., Protein Sci., 22(2):153-167, 2013.

[0254] In some aspects, the amino acid linker (e.g., one or more of L1, L2, L3, L4, L5, L6, L7, L8, L9, L10, L11, L12 etc. of a first, second, third, etc. polypeptide of an antigen binding polypeptide or antigen binding polypeptide complex structure described herein) has the sequence of g, a, gss, asg, ggssg, gssgs, gtvaa, asggs, astgg, asggsg, ggsggssgss, sggsgssggs, ggsggsgsgggsasgsg, ggsggsgsggggsasgsg, gggssggggsggsgsggsgs, ggggsggsgsggggsasgsg, gggssggsgsggsgsggsgs, sggssggsgsggsgsggsgssg, gsgssggggsggsgsggsgssg, ggggsgsggsgggssggggsggggsggggsggggsggggs, ggggsggggsggggsggggsggggsggggsggggsggggs, ggggsgsggsgggssggggsggggsggggsggggsggggssss, ggggsgsggsgggssggggsggggsggggsggggsggggssssgs, ggsgg, gsggsagsgsggggsasgsg, ggggs, or gsggsggsgsggggsasgsg (SEQ ID NOs:1-19 and 665-672) or a sequence having at least 50%, at least 60%, at least 70%, at least 80%, at least 90%, at least 91%, at least 92%, at least 93%, at least 94%, at least 95%, at least 96%, at least 97%, at least 98%, at least 99% or 100% identity to any one of SEQ ID NOs:1-19 and 665-672. For example, the amino acid linker (e.g., one or more of L1, L2, L3, L4, L5, L6, L7, L8, L9, L10, L11, L12 etc. of a first, second, third, etc. polypeptide of an antigen binding polypeptide or antigen binding polypeptide complex structure described herein) may comprise the amino acid sequence of any one of SEQ ID NOs: 1-19 and 665-672.

[0255] In some aspects, the antigen binding polypeptide or antigen binding polypeptide complex comprises a polypeptide (e.g., a first polypeptide described herein) having a structure represented by VL1-L1-VL2-L2-VH2-L3-VH1 or VH1-L1-VH2-L2-VL2-L3-VL1, wherein L1 comprises the amino acid sequence of ggssg (SEQ ID NO:1) or a sequence having at least 50%, at least 60%, at least 70%, at least 80%, at least 90% or at least 95% identity to SEQ ID NO:1; L2 comprises the amino acid sequence of ggggsggsgsggggsasgsg (SEQ ID NO:11) or a sequence having at least 50%, at least 60%, at least 70%, at least 80%, at least 90% or at least 95% identity to SEQ ID NO: 11, and L3 comprises the amino acid sequence of ggssg (SEQ ID NO:1) or a sequence having at least 50%, at least 60%, at least 70%, at least 80%, at least 90% or at least 95% identity to SEQ ID NO:1. For example, L1 may comprise an amino acid sequence having at least 90% identity (such as at least 91%, at least 92%, at least 93%, at least 94%, at least 95%, at least 96%, at least 97%, at least 98%, at least 99% or 100% identity) to SEQ ID NO:1. For example, L1 may comprise the amino acid sequence of SEQ ID NO:1. For example, L2 may comprise an amino acid sequence having at least 90% identity (such as at least 91%, at least 92%, at least 93%, at least 94%, at least 95%, at least 96%, at least 97%, at least 98%, at least 99% or 100% identity) to SEQ ID NO:11. For example, L2 may comprise the amino acid sequence of SEQ ID NO:11.

[0256] In some aspects, the antigen binding polypeptide or antigen binding polypeptide complex comprises a polypeptide (e.g., a first polypeptide described herein) having a structure represented by VL1-L1-VL2-L2-VH2-L3-VH1-L4 or VH1-L1-VH2-L2-VL2-L3-VL1-L4, wherein L1 comprises the amino acid sequence of ggssg (SEQ ID NO:1) or a sequence having at least 50%, at least 60%, at least 70%, at least 80%, at least 90%, or at least 95% identity to SEQ ID NO:1, L2 comprises the amino acid sequence of ggggsggsgsggggsasgsg (SEQ ID NO:11) or a sequence having at least 50%, at least 60%, at least 70%, at least 80%, at least 90%, or at least 95% identity to SEQ ID NO:11, L3 comprises the amino acid sequence of ggssg (SEQ ID NO: 1) or a sequence having at least 50%, at least 60%, at least 70%, at least 80%, at least 90%, or at least 95% identity to SEQ ID NO:1, and L4 comprises the amino acid sequence of asggsg (SEQ ID NO:6) or a sequence having at least 50%, at least 60%, at least 70%, at least 80%, at least 90%, or at least 95% identity to SEQ ID NO:6. For example, L1 may comprise an amino acid sequence having at least 90% identity (such as at least 91%, at least 92%, at least 93%, at least 94%, at least 95%, at least 96%, at least 97%, at least 98%, at least 99% or 100% identity) to SEQ ID NO:1. For example, L1 may comprise the amino acid sequence of SEQ ID NO:1. For example, L2 may comprise an amino acid sequence having at least 90% identity (such as at least 91%, at least 92%, at least 93%, at least 94%, at least 95%, at least 96%, at least 97%, at least 98%, at least 99% or 100% identity) to SEQ ID NO:11. For example, L2 may comprise the amino acid sequence of SEQ ID NO:11. For example, L3 may comprise an amino acid sequence having at least 90% identity (such as at least 91%, at least 92%, at least 93%, at least 94%, at least 95%, at least 96%, at least 97%, at least 98%, at least 99% or 100% identity) to SEQ ID NO:1. For example, L3 may comprise the amino acid sequence of SEQ ID NO:1. For example, L4 may comprise an amino acid sequence having at least 90% identity (such as at least 91%, at least 92%, at least 93%, at least 94%, at least 95%, at least 96%, at least 97%, at least 98%, at least 99% or 100% identity) to SEQ ID NO:6. For example, L4 may comprise the amino acid sequence of SEQ ID NO:6.

[0257] In some aspects, the antigen binding polypeptide or antigen binding polypeptide complex comprises a polypeptide (e.g., a first polypeptide described herein) having a structure represented by VL1-L1-VL2-L2-VH2-L3-VH1-L4 or VH1-L1-VH2-L2-VL2-L3-VL1-L4, wherein L1 comprises the amino acid sequence of gtvaa (SEQ ID NO:3) or a sequence having at least 50%, at least 60%, at least 70%, at least 80%, at least 90%, or at least 95% identity to SEQ ID NO:3, L2 comprises the amino acid sequence of ggggsggsgsggggsasgsg (SEQ ID NO: 11) or a sequence having at least 50%, at least 60%, at least 70%, at least 80%, at least 90%, or at least 95% identity to SEQ ID NO:11, L3 comprises the amino acid sequence of astgg (SEQ ID NO:5) or a sequence having at least 50%, at least 60%, at least 70%, at least 80%, at least 90%, or at least 95% identity to SEQ ID NO:5, and L4 comprises the amino acid sequence of asggsg (SEQ ID NO:6) or a sequence having at least 50%, at least 60%, at least 70%, at least 80%, at least 90%, or at least 95% identity to SEQ ID NO:6. For example, L1 may comprise an amino acid sequence having at least 90% identity (such as at least 91%, at least 92%, at least 93%, at least 94%, at least 95%, at least 96%, at least 97%, at least 98%, at least 99% or 100% identity) to SEQ ID NO:3. For example, L1 may comprise the amino acid sequence of SEQ ID NO:3. For example, L2 may comprise an amino acid sequence having at least 90% identity (such as at least 91%, at least 92%, at least 93%, at least 94%, at least 95%, at least 96%, at least 97%, at least 98%, at least 99% or 100% identity) to SEQ ID NO:11. For example, L2 may comprise the amino acid sequence of SEQ ID NO:11. For example, L3 may comprise an amino acid sequence having at least 90% identity (such as at least 91%, at least 92%, at least 93%, at least 94%, at least 95%, at least 96%, at least 97%, at least 98%, at least 99% or 100% identity) to SEQ ID NO:5. For example, L3 may comprise the amino acid sequence of SEQ ID NO:5. For example, L4 may comprise an amino acid sequence having at least 90% identity (such as at least 91%, at least 92%, at least 93%, at least 94%, at least 95%, at least 96%, at least 97%, at least 98%, at least 99% or 100% identity) to SEQ ID NO:6. For example, L4 may comprise the amino acid sequence of SEQ ID NO:6.

[0258] In some aspects, an antigen binding polypeptide or antigen binding polypeptide complex of the invention comprises a polypeptide (e.g., a first polypeptide described herein) having a structure represented by VL1-L1-VL2-L2-VH2-L3-VH1-CL-L4-CH1 or VH1-L1-VH2-L2-VL2-L3-VL1-CL-L4-CH1, wherein L1 comprises the amino acid sequence of ggssg (SEQ ID NO:1) or a sequence having at least 50%, at least 60%, at least 70%, at least 80%, at least 90%, or at least 95% identity to SEQ ID NO:1, L2 comprises the amino acid sequence of ggggsggsgsggggsasgsg (SEQ ID NO:11) or a sequence having at least 50%, at least 60%, at least 70%, at least 80%, at least 90%, or at least 95% identity to SEQ ID NO:11, L3 comprises the amino acid sequence of ggssg (SEQ ID NO:1) or a sequence having at least 50%, at least 60%, at least 70%, at least 80%, at least 90%, or at least 95% identity to SEQ ID NO:1, and L4 comprises the amino acid sequence of ggggsggsgsggggsasgsg (SEQ ID NO: 11) or a sequence having at least 50%, at least 60%, at least 70%, at least 80%, at least 90%, or at least 95% identity to SEQ ID NO:11. For example, L1 may comprise an amino acid sequence having at least 90% identity (such as at least 91%, at least 92%, at least 93%, at least 94%, at least 95%, at least 96%, at least 97%, at least 98%, at least 99% or 100% identity) to SEQ ID NO:1. For example, L1 may comprise the amino acid sequence of SEQ ID NO:1. For example, L2 may comprise an amino acid sequence having at least 90% identity (such as at least 91%, at least 92%, at least 93%, at least 94%, at least 95%, at least 96%, at least 97%, at least 98%, at least 99% or 100% identity) to SEQ ID NO:11. For example, L2 may comprise the amino acid sequence of SEQ ID NO:11. For example, L3 may comprise an amino acid sequence having at least 90% identity (such as at least 91%, at least 92%, at least 93%, at least 94%, at least 95%, at least 96%, at least 97%, at least 98%, at least 99% or 100% identity) to SEQ ID NO:1. For example, L3 may comprise the amino acid sequence of SEQ ID NO:1. For example, L4 may comprise an amino acid sequence having at least 90% identity (such as at least 91%, at least 92%, at least 93%, at least 94%, at least 95%, at least 96%, at least 97%, at least 98%, at least 99% or 100% identity) to SEQ ID NO:11. For example, L4 may comprise the amino acid sequence of SEQ ID NO:11.

[0259] In some aspects, an antigen binding polypeptide or antigen binding polypeptide complex of the invention comprises a polypeptide (e.g., a first polypeptide described herein) having a structure represented by VL1-L1-VL2-L2-VH2-L3-VH1-CH1-Fc, VH1-L1-VH2-L2-VL2-L3-VL1-CH1-Fc, VL1-L1-VL2-L2-VH2-L3-VH1-CL-Fc, or VH1-L1-VH2-L2-VL2-L3-VL1-CL-Fc wherein L1 comprises the amino acid sequence of ggssg (SEQ ID NO:1) or a sequence having at least 50%, at least 60%, at least 70%, at least 80%, at least 90%, or at least 95% identity to SEQ ID NO:1, L2 comprises the amino acid sequence of ggggsggsgsggggsasgsg (SEQ ID NO:11) or a sequence having at least 50%, at least 60%, at least 70%, at least 80%, at least 90%, or at least 95% identity to SEQ ID NO:11, and L3 comprises the amino acid sequence of ggssg (SEQ ID NO:1) or a sequence having at least 50%, at least 60%, at least 70%, at least 80%, at least 90%, or at least 95% identity to SEQ ID NO:1. For example, L1 may comprise an amino acid sequence having at least 90% identity (such as at least 91%, at least 92%, at least 93%, at least 94%, at least 95%, at least 96%, at least 97%, at least 98%, at least 99% or 100% identity) to SEQ ID NO:1. For example, L1 may comprise the amino acid sequence of SEQ ID NO:1. For example, L2 may comprise an amino acid sequence having at least 90% identity (such as at least 91%, at least 92%, at least 93%, at least 94%, at least 95%, at least 96%, at least 97%, at least 98%, at least 99% or 100% identity) to SEQ ID NO:11. For example, L2 may comprise the amino acid sequence of SEQ ID NO:11. For example, L3 may comprise an amino acid sequence having at least 90% identity (such as at least 91%, at least 92%, at least 93%, at least 94%, at least 95%, at least 96%, at least 97%, at least 98%, at least 99% or 100% identity) to SEQ ID NO:1. For example, L3 may comprise the amino acid sequence of SEQ ID NO:1.

[0260] In some aspects, an antigen binding polypeptide or antigen binding polypeptide complex of the invention comprises a polypeptide (e.g., a first polypeptide described herein) having a structure represented by VL1-L1-VL2-L2-VH2-L3-VH1-L4-CH1-Fc, VH1-L1-VH2-L2-VL2-L3-VL1-L4-CH1-Fc, VL1-L1-VL2-L2-VH2-L3-VH1-L4-CL-Fc, or VH1-L1-VH2-L2-VL2-L3-VL1-L4-CL-Fc, wherein L1 comprises the amino acid sequence of ggssg (SEQ ID NO:1) or a sequence having at least 50%, at least 60%, at least 70%, at least 80%, at least 90%, or at least 95% identity to SEQ ID NO:1, L2 comprises the amino acid sequence of ggggsggsgsggggsasgsg (SEQ ID NO:11) or a sequence having at least 50%, at least 60%, at least 70%, at least 80%, at least 90%, or at least 95% identity to SEQ ID NO:11, L3 comprises the amino acid sequence of ggssg (SEQ ID NO: 1) or a sequence having at least 50%, at least 60%, at least 70%, at least 80%, at least 90%, or at least 95% identity to SEQ ID NO:1, and L4 comprises the amino acid sequence of gssgs (SEQ ID NO:2) or a sequence having at least 50%, at least 60%, at least 70%, at least 80%, at least 90%, or at least 95% identity to SEQ ID NO:2. For example, L1 may comprise an amino acid sequence having at least 90% identity (such as at least 91%, at least 92%, at least 93%, at least 94%, at least 95%, at least 96%, at least 97%, at least 98%, at least 99% or 100% identity) to SEQ ID NO:1. For example, L1 may comprise the amino acid sequence of SEQ ID NO:1. For example, L2 may comprise an amino acid sequence having at least 90% identity (such as at least 91%, at least 92%, at least 93%, at least 94%, at least 95%, at least 96%, at least 97%, at least 98%, at least 99% or 100% identity) to SEQ ID NO:11. For example, L2 may comprise the amino acid sequence of SEQ ID NO:11. For example, L3 may comprise an amino acid sequence having at least 90% identity (such as at least 91%, at least 92%, at least 93%, at least 94%, at least 95%, at least 96%, at least 97%, at least 98%, at least 99% or 100% identity) to SEQ ID NO:1. For example, L3 may comprise the amino acid sequence of SEQ ID NO:1. For example, L4 may comprise an amino acid sequence having at least 90% identity (such as at least 91%, at least 92%, at least 93%, at least 94%, at least 95%, at least 96%, at least 97%, at least 98%, at least 99% or 100% identity) to SEQ ID NO:2. For example, L4 may comprise the amino acid sequence of SEQ ID NO:2.

[0261] In some aspects, an antigen binding polypeptide complex of the invention comprises a polypeptide (e.g., a second or third polypeptide described herein) having a structure represented by VL3-L4-VH3 or VH3-L4-VL3, wherein L4 comprises the amino acid sequence of ggggsggsgsggggsasgsg (SEQ ID NO:11) or a sequence having at least 50%, at least 60%, at least 70%, at least 80%, at least 90%, or at least 95% identity to SEQ ID NO: 11. For example, L4 may comprise an amino acid sequence having at least 90% identity (such as at least 91%, at least 92%, at least 93%, at least 94%, at least 95%, at least 96%, at least 97%, at least 98%, at least 99% or 100% identity) to SEQ ID NO:11. For example, L4 may comprise the amino acid sequence of SEQ ID NO:11.

[0262] In another aspect, an antigen binding polypeptide complex of the invention comprises a second polypeptide having a structure represented by VL3-L4-VH3-L5 or VH3-L4-L5, wherein L4 comprises the amino acid sequence of ggggsggsgsggggsasgsg (SEQ ID NO: 11) or a sequence having at least 50%, at least 60%, at least 70%, at least 80%, at least 90%, or at least 95% identity to SEQ ID NO:11, and L5 comprises the amino acid sequence of asggsg (SEQ ID NO:6) or a sequence having at least 50%, at least 60%, at least 70%, at least 80%, at least 90%, or at least 95% identity to SEQ ID NO:6. For example, L4 may comprise an amino acid sequence having at least 90% identity (such as at least 91%, at least 92%, at least 93%, at least 94%, at least 95%, at least 96%, at least 97%, at least 98%, at least 99% or 100% identity) to SEQ ID NO:11. For example, L5 may comprise the amino acid sequence of SEQ ID NO:11. For example, L4 may comprise an amino acid sequence having at least 90% identity (such as at least 91%, at least 92%, at least 93%, at least 94%, at least 95%, at least 96%, at least 97%, at least 98%, at least 99% or 100% identity) to SEQ ID NO:6. For example, L5 may comprise the amino acid sequence of SEQ ID NO:6.

[0263] In another aspect, an antigen binding polypeptide complex of the invention comprises a polypeptide (e.g., a second or third polypeptide described herein) having a structure represented by VL3-CL-L1-VH3-CH1-Fc, VH3-CL-L1-VL3-CH1-Fc, VL3-CH1-L1-VH3-CL-Fc, or VH3-CH1-L1-VL3-CL-Fc, wherein L1 comprises the amino acid sequence of GGGGSGGGGSGGGGSGGGGSGGGGSGGGGSGGGGSGGGGS (SEQ ID NO:16) or a sequence having at least 50%, at least 60%, at least 70%, at least 80%, at least 90%, or at least 95% identity to SEQ ID NO:16. For example, L1 may comprise an amino acid sequence having at least 90% identity (such as at least 91%, at least 92%, at least 93%, at least 94%, at least 95%, at least 96%, at least 97%, at least 98%, at least 99% or 100% identity) to SEQ ID NO:16. For example, L1 may comprise the amino acid sequence of SEQ ID NO:16.

[0264] In some aspects, an antigen binding polypeptide complex of the invention comprises a polypeptide (e.g., a second or third polypeptide described herein) having a structure represented by VL3-L1-VH3-CH1-L2-CL-Fc, VH3-L1-VL3-CH1-L2-CL-Fc, VL3-L1-VH3-CL-L2-CH1-Fc, or VH3-L1-VL3-CL-L2-CH1-Fc, wherein L1 and L2 each comprise the amino acid sequence of ggggsggsgsggggsasgsg (SEQ ID NO:11), ggsggsgsgggsasgsg (SEQ ID NO:19), or a sequence having at least 50%, at least 60%, at least 70%, at least 80%, at least 90%, or at least 95% identity to SEQ ID NO: 11 or SEQ ID NO: 19. For example, L1 may comprise an amino acid sequence having at least 90% identity (such as at least 91%, at least 92%, at least 93%, at least 94%, at least 95%, at least 96%, at least 97%, at least 98%, at least 99% or 100% identity) to SEQ ID NO: 11 or 19. For example, L1 may comprise the amino acid sequence of SEQ ID NO:11 or 19. For example, L2 may comprise an amino acid sequence having at least 90% identity (such as at least 91%, at least 92%, at least 93%, at least 94%, at least 95%, at least 96%, at least 97%, at least 98%, at least 99% or 100% identity) to SEQ ID NO:11 or 19. For example, L2 may comprise the amino acid sequence of SEQ ID NO:11 or 19.

[0265] In another aspect, an antigen binding polypeptide complex of the invention comprises a polypeptide (e.g., a second or third polypeptide described herein) having a structure represented by VL3-L1-VH3-L2-CL-Fc, VH3-L1-VL3-L2-CL-Fc, VL3-L1-VH3-L2-CH1-Fc, or VH3-L1-VL3-L2-CH1-Fc, wherein L1 comprises the amino acid sequence of ggggsggsgsggggsasgsg (SEQ ID NO: 11), or a sequence having at least 50%, at least 60%, at least 70%, at least 80%, at least 90%, or at least 95% identity to SEQ ID NO: 11, and L2 comprises the amino acid sequence of a or asggs (SEQ ID NO:4) or a sequence having at least 50%, at least 60%, at least 70%, at least 80%, at least 90%, or at least 95% identity to SEQ ID NO:4. For example, L1 may comprise an amino acid sequence having at least 90% identity (such as at least 91%, at least 92%, at least 93%, at least 94%, at least 95%, at least 96%, at least 97%, at least 98%, at least 99% or 100% identity) to SEQ ID NO: 11. For example, L1 may comprise the amino acid sequence of SEQ ID NO:11. For example, L2 may comprise an amino acid sequence having at least 90% identity (such as at least 91%, at least 92%, at least 93%, at least 94%, at least 95%, at least 96%, at least 97%, at least 98%, at least 99% or 100% identity) to SEQ ID NO:4. For example, L2 may comprise the amino acid sequence of SEQ ID NO:4.

[0266] In some aspects, the antigen binding polypeptide or antigen binding polypeptide complex comprises a polypeptide (e.g., a first polypeptide described herein) having a structure represented by VL1-L1-VL2-L2-VH2-L3-VH1 or VH1-L1-VH2-L2-VL2-L3-VL1; wherein L1 comprises the amino acid sequence of ggssg (SEQ ID NO:1) or a sequence having at least 50%, at least 60%, at least 70%, at least 80%, at least 90% or at least 95% identity to SEQ ID NO:1; L2 comprises the amino acid sequence of ggggsggsgsggggsasgsg (SEQ ID NO:11) or a sequence having at least 50%, at least 60%, at least 70%, at least 80%, at least 90% or at least 95% identity to SEQ ID NO:11, and L3 comprises the amino acid sequence of ggssg (SEQ ID NO:1) or a sequence having at least 50%, at least 60%, at least 70%, at least 80%, at least 90% or at least 95% identity to SEQ ID NO: 1; VL1 is a first immunoglobulin light chain variable region that specifically binds to A2AR, APRIL, ATPDase, BAFF, BAFFR, BCMA, BlyS, BTK, BTLA, B7DC, B7H1, B7H2, B7H3, B7H4, B7H5, B7H6, B7H7, B7RP1, B7-4, C3, C5, CCL2, CCL3, CCL4, CCL5, CCL7, CCL8, CCL11, CCL15, CCL17, CCL19, CCL20, CCL21, CCL25 CCR3, CCR4, CD3, CD19, CD20, CD24, CD27, CD28, CD38, CD39, CD40, CD40L, CD47, CD52, CD70, CD80, CD86, CD123, CD133, CD137, CD137L, CD160, CD272, CEACAM5, CLEC9, CLEC91, CRTH2, CSF-1, CSF-2, CSF-3, CXCL1, CXCL2, CXCL4, CXCL12, CXCL13, CXCR3, cMet, CTLA4, DLL3, DNGR-1, E-cadherin, EGFR, ENTPD1, EpCAM, FCER1, FCER1A, FCER2, FGFR, FLAP, FOLH1, Gi24, GITR, GITRL, GPR5, HER2, HER3, ICOSL, ICOS, HHLA2, HMGB1, HVEM, IDO, IFNa, IgE, IGF1R, IL2Rbeta, IL1, IL1A, IL1B, IL1F10, IL2, IL4, IL4Ra, IL5, IL5R, IL6, IL7, IL7Ra, IL8, IL9, IL9R, IL10, rhIL10, IL12, IL13, IL13Ra1, IL13Ra2, IL15, IL17, IL17Rb, IL18, IL22, IL23, IL25, IL7, IL33, IL35, ITGB4, ITK, KIR, LAG3, LAMP1, leptin, LPFS2, MHC class II, MUC-1, MUC-16, NCR3LG1, NKG2D, NKp46, NTPDase-1, OX40, OX40L, PD-1, PD-L1, PD-L2, PROM1, S152, SIRPalpha, SISP1, SLC, SPG64, ST2, STEAP1, STEAP2, Syk kinase, STEAP1, TROP2, TACI, TDO, T14, TIGIT, TIM3, TLR, TLR2, TLR4, TLR5, TLR9, TMEF1, TNFa, TNFRSF7, Tp55, TREM1, TSLP, TSLPR, TWEAK, VEGF, VISTA, Vstm3, WUCAM, DLL4, TGFbeta, GP100, GPRC5D, CD30 or CD16A; VL2 is a second immunoglobulin light chain variable region that specifically binds to A2AR, APRIL, ATPDase, BAFF, BAFFR, BCMA, BlyS, BTK, BTLA, B7DC, B7H1, B7H2, B7H3, B7H4, B7H5, B7H6, B7H7, B7RP1, B7-4, C3, C5, CCL2, CCL3, CCL4, CCL5, CCL7, CCL8, CCL11, CCL15, CCL17, CCL19, CCL20, CCL21, CCL25 CCR3, CCR4, CD3, CD19, CD20, CD24, CD27, CD28, CD38, CD39, CD40, CD40L, CD47, CD52, CD70, CD80, CD86, CD123, CD133, CD137, CD137L, CD160, CD272, CEACAM5, CLEC9, CLEC91, CRTH2, CSF-1, CSF-2, CSF-3, CXCL1, CXCL2, CXCL4, CXCL12, CXCL13, CXCR3, cMet, CTLA4, DLL3, DNGR-1, E-cadherin, EGFR, ENTPD1, EpCAM, FCER1, FCER1A, FCER2, FGFR, FLAP, FOLH1, Gi24, GITR, GITRL, GPR5, HER2, HER3, ICOSL, ICOS, HHLA2, HMGB1, HVEM, IDO, IFNa, IgE, IGF1R, IL2Rbeta, IL1, IL1A, IL1B, IL1F10, IL2, IL4, IL4Ra, IL5, IL5R, IL6, IL7, IL7Ra, IL8, IL9, IL9R, IL10, rhIL10, IL12, IL13, IL13Ra1, IL13Ra2, IL15, IL17, IL17Rb, IL18, IL22, IL23, IL25, IL7, IL33, IL35, ITGB4, ITK, KIR, LAG3, LAMP1, leptin, LPFS2, MHC class II, MUC-1, MUC-16, NCR3LG1, NKG2D, NKp46, NTPDase-1, OX40, OX40L, PD-1, PD-L1, PD-L2, PROM1, S152, SIRPalpha, SISP1, SLC, SPG64, ST2, STEAP1, STEAP2, Syk kinase, STEAP1, TROP2, TACI, TDO, T14, TIGIT, TIM3, TLR, TLR2, TLR4, TLR5, TLR9, TMEF1, TNFa, TNFRSF7, Tp55, TREM1, TSLP, TSLPR, TWEAK, VEGF, VISTA, Vstm3, WUCAM, DLL4, TGFbeta, GP100, GPRC5D, CD30 or CD16A; VH1 is a first immunoglobulin heavy chain variable region that specifically binds to A2AR, APRIL, ATPDase, BAFF, BAFFR, BCMA, BlyS, BTK, BTLA, B7DC, B7H1, B7H2, B7H3, B7H4, B7H5, B7H6, B7H7, B7RP1, B7-4, C3, C5, CCL2, CCL3, CCL4, CCL5, CCL7, CCL8, CCL11, CCL15, CCL17, CCL19, CCL20, CCL21, CCL25 CCR3, CCR4, CD3, CD19, CD20, CD24, CD27, CD28, CD38, CD39, CD40, CD40L, CD47, CD52, CD70, CD80, CD86, CD123, CD133, CD137, CD137L, CD160, CD272, CEACAM5, CLEC9, CLEC91, CRTH2, CSF-1, CSF-2, CSF-3, CXCL1, CXCL2, CXCL4, CXCL12, CXCL13, CXCR3, cMet, CTLA4, DLL3, DNGR-1, E-cadherin, EGFR, ENTPD1, EpCAM, FCER1, FCER1A, FCER2, FGFR, FLAP, FOLH1, Gi24, GITR, GITRL, GPR5, HER2, HER3, ICOSL, ICOS, HHLA2, HMGB1, HVEM, IDO, IFNa, IgE, IGF1R, IL2Rbeta, IL1, IL1A, IL1B, IL1F10, IL2, IL4, IL4Ra, IL5, IL5R, IL6, IL7, IL7Ra, IL8, IL9, IL9R, IL10, rhIL10, IL12, IL13, IL13Ra1, IL13Ra2, IL15, IL17, IL17Rb, IL18, IL22, IL23, IL25, IL7, IL33, IL35, ITGB4, ITK, KIR, LAG3, LAMP1, leptin, LPFS2, MHC class II, MUC-1, MUC-16, NCR3LG1, NKG2D, NKp46, NTPDase-1, OX40, OX40L, PD-1, PD-L1, PD-L2, PROM1, S152, SIRPalpha, SISP1, SLC, SPG64, ST2, STEAP1, STEAP2, Syk kinase, STEAP1, TROP2, TACI, TDO, T14, TIGIT, TIM3, TLR, TLR2, TLR4, TLRS, TLR9, TMEF1, TNFa, TNFRSF7, Tp55, TREM1, TSLP, TSLPR, TWEAK, VEGF, VISTA, Vstm3, WUCAM, DLL4, TGFbeta, GP100, GPRC5D, CD30 or CD16A; and VH2 is a second immunoglobulin heavy chain variable region that specifically binds to A2AR, APRIL, ATPDase, BAFF, BAFFR, BCMA, BlyS, BTK, BTLA, B7DC, B7H1, B7H2, B7H3, B7H4, B7H5, B7H6, B7H7, B7RP1, B7-4, C3, C5, CCL2, CCL3, CCL4, CCL5, CCL7, CCL8, CCL11, CCL15, CCL17, CCL19, CCL20, CCL21, CCL25 CCR3, CCR4, CD3, CD19, CD20, CD24, CD27, CD28, CD38, CD39, CD40, CD40L, CD47, CD52, CD70, CD80, CD86, CD123, CD133, CD137, CD137L, CD160, CD272, CEACAM5, CLEC9, CLEC91, CRTH2, CSF-1, CSF-2, CSF-3, CXCL1, CXCL2, CXCL4, CXCL12, CXCL13, CXCR3, cMet, CTLA4, DLL3, DNGR-1, E-cadherin, EGFR, ENTPD1, EpCAM, FCER1, FCER1A, FCER2, FGFR, FLAP, FOLH1, Gi24, GITR, GITRL, GPRS, HER2, HER3, ICOSL, ICOS, HHLA2, HMGB1, HVEM, IDO, IFNa, IgE, IGF1R, IL2Rbeta, IL1, IL1A, IL1B, IL1F10, IL2, IL4, IL4Ra, IL5, IL5R, IL6, IL7, IL7Ra, IL8, IL9, IL9R, IL10, rhIL10, IL12, IL13, IL13Ra1, IL13Ra2, IL15, IL17, IL17Rb, IL18, IL22, IL23, IL25, IL7, IL33, IL35, ITGB4, ITK, KIR, LAG3, LAMP1, leptin, LPFS2, MHC class II, MUC-1, MUC-16, NCR3LG1, NKG2D, NKp46, NTPDase-1, OX40, OX40L, PD-1, PD-L1, PD-L2, PROM1, S1S2, SIRPalpha, SISP1, SLC, SPG64, ST2, STEAP1, STEAP2, Syk kinase, STEAP1, TROP2, TACI, TDO, T14, TIGIT, TIM3, TLR, TLR2, TLR4, TLRS, TLR9, TMEF1, TNFa, TNFRSF7, Tp55, TREM1, TSLP, TSLPR, TWEAK, VEGF, VISTA, Vstm3, WUCAM, DLL4, TGFbeta, GP100, GPRC5D, CD30 or CD16A.

[0267] In some aspects, the antigen binding polypeptide or antigen binding polypeptide complex comprises a polypeptide (e.g., a first polypeptide described herein) having a structure represented by VL1-L1-VL2-L2-VH2-L3-VH1-L4 or VH1-L1-VH2-L2-VL2-L3-VL1-L4; wherein L1 comprises the amino acid sequence of ggssg (SEQ ID NO:1) or a sequence having at least 50%, at least 60%, at least 70%, at least 80%, at least 90%, or at least 95% identity to SEQ ID NO:1, L2 comprises the amino acid sequence of ggggsggsgsggggsasgsg (SEQ ID NO:11) or a sequence having at least 50%, at least 60%, at least 70%, at least 80%, at least 90%, or at least 95% identity to SEQ ID NO:11, L3 comprises the amino acid sequence of ggssg (SEQ ID NO: 1) or a sequence having at least 50%, at least 60%, at least 70%, at least 80%, at least 90%, or at least 95% identity to SEQ ID NO:1, and L4 comprises the amino acid sequence of asggsg (SEQ ID NO:6) or a sequence having at least 50%, at least 60%, at least 70%, at least 80%, at least 90%, or at least 95% identity to SEQ ID NO:6; VL1 is a first immunoglobulin light chain variable region that specifically binds to A2AR, APRIL, ATPDase, BAFF, BAFFR, BCMA, BlyS, BTK, BTLA, B7DC, B7H1, B7H2, B7H3, B7H4, B7H5, B7H6, B7H7, B7RP1, B7-4, C3, C5, CCL2, CCL3, CCL4, CCL5, CCL7, CCL8, CCL11, CCL15, CCL17, CCL19, CCL20, CCL21, CCL25 CCR3, CCR4, CD3, CD19, CD20, CD24, CD27, CD28, CD38, CD39, CD40, CD40L, CD47, CD52, CD70, CD80, CD86, CD123, CD133, CD137, CD137L, CD160, CD272, CEACAM5, CLEC9, CLEC91, CRTH2, CSF-1, CSF-2, CSF-3, CXCL1, CXCL2, CXCL4, CXCL12, CXCL13, CXCR3, cMet, CTLA4, DLL3, DNGR-1, E-cadherin, EGFR, ENTPD1, EpCAM, FCER1, FCER1A, FCER2, FGFR, FLAP, FOLH1, Gi24, GITR, GITRL, GPR5, HER2, HER3, ICOSL, ICOS, HHLA2, HMGB1, HVEM, IDO, IFNa, IgE, IGF1R, IL2Rbeta, IL1, IL1A, IL1B, ILF10, IL2, IL4, IL4Ra, IL5, IL5R, IL6, IL7, IL7Ra, IL8, IL9, IL9R, IL10, rhIL10, IL12, IL13, IL13Ra1, IL13Ra2, IL15, IL17, IL17Rb, IL18, IL22, IL23, IL25, IL7, IL33, IL35, ITGB4, ITK, KIR, LAG3, LAMP1, leptin, LPFS2, MHC class II, MUC-1, MUC-16, NCR3LG1, NKG2D, NKp46, NTPDase-1, OX40, OX40L, PD-1, PD-L1, PD-L2, PROM1, S152, SIRPalpha, SISP1, SLC, SPG64, ST2, STEAP1, STEAP2, Syk kinase, STEAP1, TROP2, TACI, TDO, T14, TIGIT, TIM3, TLR, TLR2, TLR4, TLR5, TLR9, TMEF1, TNFa, TNFRSF7, Tp55, TREM1, TSLP, TSLPR, TWEAK, VEGF, VISTA, Vstm3, WUCAM, DLL4, TGFbeta, GP100, GPRC5D, CD30 or CD16A; VL2 is a second immunoglobulin light chain variable region that specifically binds to A2AR, APRIL, ATPDase, BAFF, BAFFR, BCMA, BlyS, BTK, BTLA, B7DC, B7H1, B7H2, B7H3, B7H4, B7H5, B7H6, B7H7, B7RP1, B7-4, C3, C5, CCL2, CCL3, CCL4, CCL5, CCL7, CCL8, CCL11, CCL15, CCL17, CCL19, CCL20, CCL21, CCL25 CCR3, CCR4, CD3, CD19, CD20, CD24, CD27, CD28, CD38, CD39, CD40, CD40L, CD47, CD52, CD70, CD80, CD86, CD123, CD133, CD137, CD137L, CD160, CD272, CEACAM5, CLEC9, CLEC91, CRTH2, CSF-1, CSF-2, CSF-3, CXCL1, CXCL2, CXCL4, CXCL12, CXCL13, CXCR3, cMet, CTLA4, DLL3, DNGR-1, E-cadherin, EGFR, ENTPD1, EpCAM, FCER1, FCER1A, FCER2, FGFR, FLAP, FOLH1, Gi24, GITR, GITRL, GPR5, HER2, HER3, ICOSL, ICOS, HHLA2, HMGB1, HVEM, IDO, IFNa, IgE, IGF1R, IL2Rbeta, IL1, IL1A, IL1B, IL1F10, IL2, IL4, IL4Ra, IL5, IL5R, IL16, IL7, IL7Ra, IL8, IL9, IL9R, I110, rhIL10, IL12, IL13, IL13Ra1, IL13Ra2, IL15, IL17, IL17Rb, IL18, IL22, IL23, IL25, 117, 1133, IL35, ITGB4, ITK, KIR, LAG3, LAMP1, leptin, LPFS2, MHC class II, MUC-1, MUC-16, NCR3LG1, NKG2D, NKp46, NTPDase-1, OX40, OX40L, PD-1, PD-L1, PD-L2, PROM1, S152, SIRPalpha, SISP1, SLC, SPG64, ST2, STEAP1, STEAP2, Syk kinase, STEAP1, TROP2, TACI, TDO, T14, TIGIT, TIM3, TLR, TLR2, TLR4, TLR5, TLR9, TMEF1, TNFa, TNFRSF7, Tp55, TREM1, TSLP, TSLPR, TWEAK, VEGF, VISTA, Vstm3, WUCAM, DLL4, TGFbeta, GP100, GPRC5D, CD30 or CD16A; VH1 is a first immunoglobulin heavy chain variable region that specifically binds to A2AR, APRIL, ATPDase, BAFF, BAFFR, BCMA, BlyS, BTK, BTLA, B7DC, B7H1, B7H2, B7H3, B7H4, B7H5, B7H6, B7H7, B7RP1, B7-4, C3, C5, CCL2, CCL3, CCL4, CCL5, CCL7, CCL8, CCL11, CCL15, CCL17, CCL19, CCL20, CCL21, CCL25 CCR3, CCR4, CD3, CD19, CD20, CD24, CD27, CD28, CD38, CD39, CD40, CD40L, CD47, CD52, CD70, CD80, CD86, CD123, CD133, CD137, CD137L, CD160, CD272, CEACAM5, CLEC9, CLEC91, CRTH2, CSF-1, CSF-2, CSF-3, CXCL1, CXCL2, CXCL4, CXCL12, CXCL13, CXCR3, cMet, CTLA4, DLL3, DNGR-1, E-cadherin, EGFR, ENTPD1, EpCAM, FCER1, FCER1A, FCER2, FGFR, FLAP, FOLH1, Gi24, GITR, GITRL, GPR5, HER2, HER3, ICOSL, ICOS, HHLA2, HMGB1, HVEM, IDO, IFNa, IgE, IGF1R, IL2Rbeta, IL1, IL1A, IL1B, IL1F10, IL12, IL14, I14Ra, IL5, IL5R, IL16, 117, IL7Ra, 118, 119, IL9R, IL10, rhIL10, IL12, IL13, I13Ra1, IL13Ra2, IL15, IL17, IL17Rb, IL18, IL22, IL23, IL25, 117, IL33, IL35, ITGB4, ITK, KIR, LAG3, LAMP1, leptin, LPFS2, MHC class II, MUC-1, MUC-16, NCR3LG1, NKG2D, NKp46, NTPDase-1, OX40, OX40L, PD-1, PD-L1, PD-L2, PROM1, S152, SIRPalpha, SISP1, SLC, SPG64, ST2, STEAP1, STEAP2, Syk kinase, STEAP1, TROP2, TACI, TDO, T14, TIGIT, TIM3, TLR, TLR2, TLR4, TLRS, TLR9, TMEF1, TNFa, TNFRSF7, Tp55, TREM1, TSLP, TSLPR, TWEAK, VEGF, VISTA, Vstm3, WUCAM, DLL4, TGFbeta, GP100, GPRC5D, CD30 or CD16A; and VH2 is a second immunoglobulin heavy chain variable region that specifically binds to A2AR, APRIL, ATPDase, BAFF, BAFFR, BCMA, BlyS, BTK, BTLA, B7DC, B7H1, B7H2, B7H3, B7H4, B7H5, B7H6, B7H7, B7RP1, B7-4, C3, C5, CCL2, CCL3, CCL4, CCL5, CCL7, CCL8, CCL11, CCL15, CCL17, CCL19, CCL20, CCL21, CCL25 CCR3, CCR4, CD3, CD19, CD20, CD24, CD27, CD28, CD38, CD39, CD40, CD40L, CD47, CD52, CD70, CD80, CD86, CD123, CD133, CD137, CD137L, CD160, CD272, CEACAM5, CLEC9, CLEC91, CRTH2, CSF-1, CSF-2, CSF-3, CXCL1, CXCL2, CXCL4, CXCL12, CXCL13, CXCR3, cMet, CTLA4, DLL3, DNGR-1, E-cadherin, EGFR, ENTPD1, EpCAM, FCER1, FCER1A, FCER2, FGFR, FLAP, FOLH1, Gi24, GITR, GITRL, GPR5, HER2, HER3, ICOSL, ICOS, HHLA2, HMGB1, HVEM, IDO, IFNa, IgE, IGF1R, I2Rbeta, IL1, IL1A, IL1B, IL1F10, IL2, IL4, IL4Ra, IL5, IL5R, IL6, IL7, IL7Ra, IL8, IL9, IL9R, IL10, rhIL10, IL12, IL13, IL13Ra1, IL13Ra2, IL15, IL17, IL17Rb, IL18, IL22, IL23, IL25, IL7, IL33, IL35, ITGB4, ITK, KIR, LAG3, LAMP1, leptin, LPFS2, MHC class II, MUC-1, MUC-16, NCR3LG1, NKG2D, NKp46, NTPDase-1, OX40, OX40L, PD-1, PD-L1, PD-L2, PROM1, S152, SIRPalpha, SISP1, SLC, SPG64, ST2, STEAP1, STEAP2, Syk kinase, STEAP1, TROP2, TACI, TDO, T14, TIGIT, TIM3, TLR, TLR2, TLR4, TLR5, TLR9, TMEF1, TNFa, TNFRSF7, Tp55, TREM1, TSLP, TSLPR, TWEAK, VEGF, VISTA, Vstm3, WUCAM, DLL4, TGFbeta, GP100, GPRC5D, CD30 or CD16A.

[0268] In some aspects, the antigen binding polypeptide or antigen binding polypeptide complex comprises a polypeptide (e.g., a first polypeptide described herein) having a structure represented by VL1-L1-VL2-L2-VH2-L3-VH1-L4 or VH1-L1-VH2-L2-VL2-L3-VL1-L4, wherein L1 comprises the amino acid sequence of gtvaa (SEQ ID NO:3) or a sequence having at least 50%, at least 60%, at least 70%, at least 80%, at least 90%, or at least 95% identity to SEQ ID NO:3, L2 comprises the amino acid sequence of ggggsggsgsggggsasgsg (SEQ ID NO: 11) or a sequence having at least 50%, at least 60%, at least 70%, at least 80%, at least 90%, or at least 95% identity to SEQ ID NO:11, L3 comprises the amino acid sequence of astgg (SEQ ID NO:5) or a sequence having at least 50%, at least 60%, at least 70%, at least 80%, at least 90%, or at least 95% identity to SEQ ID NO:5, and L4 comprises the amino acid sequence of asggsg (SEQ ID NO:6) or a sequence having at least 50%, at least 60%, at least 70%, at least 80%, at least 90%, or at least 95% identity to SEQ ID NO:6; VL1 is a first immunoglobulin light chain variable region that specifically binds to A2AR, APRIL, ATPDase, BAFF, BAFFR, BCMA, BlyS, BTK, BTLA, B7DC, B7H1, B7H2, B7H3, B7H4, B7H5, B7H6, B7H7, B7RP1, B7-4, C3, C5, CCL2, CCL3, CCL4, CCL5, CCL7, CCL8, CCL11, CCL15, CCL17, CCL19, CCL20, CCL21, CCL25 CCR3, CCR4, CD3, CD19, CD20, CD24, CD27, CD28, CD38, CD39, CD40, CD40L, CD47, CD52, CD70, CD80, CD86, CD123, CD133, CD137, CD137L, CD160, CD272, CEACAM5, CLEC9, CLEC91, CRTH2, CSF-1, CSF-2, CSF-3, CXCL1, CXCL2, CXCL4, CXCL12, CXCL13, CXCR3, cMet, CTLA4, DLL3, DNGR-1, E-cadherin, EGFR, ENTPD1, EpCAM, FCER1, FCER1A, FCER2, FGFR, FLAP, FOLH1, Gi24, GITR, GITRL, GPR5, HER2, HER3, ICOSL, ICOS, HHLA2, HMGB1, HVEM, IDO, IFNa, IgE, IGF1R, I2Rbeta, R1, IL1A, IL1B, IL1F10, IL2, R4, IL4Ra, IL5, IL5R, IL6, IL7, IL7Ra, IL8, IL9, IL9R, IL10, rhIL10, IR12, IL13, IL13Ra1, IL13Ra2, IL15, IL17, R17Rb, IL18, IL22, IL23, IL25, IL7, IL33, IL35, ITGB4, ITK, KIR, LAG3, LAMP1, leptin, LPFS2, MHC class II, MUC-1, MUC-16, NCR3LG1, NKG2D, NKp46, NTPDase-1, OX40, OX40L, PD-1, PD-L1, PD-L2, PROM1, S152, SIRPalpha, SISP1, SLC, SPG64, ST2, STEAP1, STEAP2, Syk kinase, STEAP1, TROP2, TACI, TDO, T14, TIGIT, TIM3, TLR, TLR2, TLR4, TLR5, TLR9, TMEF1, TNFa, TNFRSF7, Tp55, TREM1, TSLP, TSLPR, TWEAK, VEGF, VISTA, Vstm3, WUCAM, DLL4, TGFbeta, GP100, GPRC5D, CD30 or CD16A; VL2 is a second immunoglobulin light chain variable region that specifically binds to A2AR, APRIL, ATPDase, BAFF, BAFFR, BCMA, BlyS, BTK, BTLA, B7DC, B7H1, B7H2, B7H3, B7H4, B7H5, B7H6, B7H7, B7RP1, B7-4, C3, C5, CCL2, CCL3, CCL4, CCL5, CCL7, CCL8, CCL11, CCL15, CCL17, CCL19, CCL20, CCL21, CCL25 CCR3, CCR4, CD3, CD19, CD20, CD24, CD27, CD28, CD38, CD39, CD40, CD40L, CD47, CD52, CD70, CD80, CD86, CD123, CD133, CD137, CD137L, CD160, CD272, CEACAM5, CLEC9, CLEC91, CRTH2, CSF-1, CSF-2, CSF-3, CXCL1, CXCL2, CXCL4, CXCL12, CXCL13, CXCR3, cMet, CTLA4, DLL3, DNGR-1, E-cadherin, EGFR, ENTPD1, EpCAM, FCER1, FCER1A, FCER2, FGFR, FLAP, FOLH1, Gi24, GITR, GITRL, GPR5, HER2, HER3, ICOSL, ICOS, HHLA2, HMGB1, HVEM, IDO, IFNa, IgE, IGF1R, IL2Rbeta, IL1, IL1A, IL1B, ILF10, IL2, IL4, IL4Ra, IL5, IL5R, IL6, IL7, IL7Ra, IL8, IL9, IL9R, IL10, rhIL10, IL12, IL13, IL13Ra1, IL13Ra2, IL15, IL17, IL17Rb, IL18, IL22, IL23, IL25, IL7, IL33, IL35, ITGB4, ITK, KIR, LAG3, LAMP1, leptin, LPFS2, MHC class II, MUC-1, MUC-16, NCR3LG1, NKG2D, NKp46, NTPDase-1, OX40, OX40L, PD-1, PD-L1, PD-L2, PROM1, S152, SIRPalpha, SISP1, SLC, SPG64, ST2, STEAP1, STEAP2, Syk kinase, STEAP1, TROP2, TACI, TDO, T14, TIGIT, TIM3, TLR, TLR2, TLR4, TLRS, TLR9, TMEF1, TNFa, TNFRSF7, Tp55, TREM1, TSLP, TSLPR, TWEAK, VEGF, VISTA, Vstm3, WUCAM, DLL4, TGFbeta, GP100, GPRC5D, CD30 or CD16A; VH1 is a first immunoglobulin heavy chain variable region that specifically binds to A2AR, APRIL, ATPDase, BAFF, BAFFR, BCMA, BlyS, BTK, BTLA, B7DC, B7H1, B7H2, B7H3, B7H4, B7H5, B7H6, B7H7, B7RP1, 1B7-4, C3, C5, CCL2, CCL3, CCL4, CCL5, CCL7, CCL8, CCL11, CCL15, CCL17, CCL19, CCL20, CCL21, CCL25 CCR3, CCR4, CD3, CD19, CD20, CD24, CD27, CD28, CD38, CD39, CD40, CD40L, CD47, CD52, CD70, CD80, CD86, CD123, CD133, CD137, CD137L, CD160, CD272, CEACAM5, CLEC9, CLEC91, CRTH2, CSF-1, CSF-2, CSF-3, CXCL1, CXCL2, CXCL4, CXCL12, CXCL13, CXCR3, cMet, CTLA4, DLL3, DNGR-1, E-cadherin, EGFR, ENTPD1, EpCAM, FCER1, FCER1A, FCER2, FGFR, FLAP, FOLH1, Gi24, GITR, GITRL, GPR5, HER2, HER3, ICOSL, ICOS, HHLA2, HMGB1, HVEM, IDO, IFNa, IgE, IGF1R, IL2Rbeta, IL1, IL1A, IL1B, IL1F10, IL2, IL4, IL4Ra, IL5, IL5R, IL6, IL7, IL7Ra, IL8, IL9, IL9R, IL10, rhIL10, IL12, IL13, IL13Ra1, IL13Ra2, IL15, IL17, IL17Rb, IL18, IL22, IL23, IL25, IL7, IL33, IL35, ITGB4, ITK, KIR, LAG3, LAMP1, leptin, LPFS2, MHC class II, MUC-1, MUC-16, NCR3LG1, NKG2D, NKp46, NTPDase-1, OX40, OX40L, PD-1, PD-L1, PD-L2, PROM1, S1S2, SIRPalpha, SISP1, SLC, SPG64, ST2, STEAP1, STEAP2, Syk kinase, STEAP1, TROP2, TACI, TDO, T14, TIGIT, TIM3, TLR, TLR2, TLR4, TLRS, TLR9, TMEF1, TNFa, TNFRSF7, Tp55, TREM1, TSLP, TSLPR, TWEAK, VEGF, VISTA, Vstm3, WUCAM, DLL4, TGFbeta, GP100, GPRC5D, CD30 or CD16A; and VH2 is a second immunoglobulin heavy chain variable region that specifically binds to A2AR, APRIL, ATPDase, BAFF, BAFFR, BCMA, BlyS, BTK, BTLA, B7DC, B7H1, B7H2, B7H3, B7H4, B7H5, B7H6, B7H7, B7RP1, 1B7-4, C3, C5, CCL2, CCL3, CCL4, CCL5, CCL7, CCL8, CCL11, CCL15, CCL17, CCL19, CCL20, CCL21, CCL25 CCR3, CCR4, CD3, CD19, CD20, CD24, CD27, CD28, CD38, CD39, CD40, CD40L, CD47, CD52, CD70, CD80, CD86, CD123, CD133, CD137, CD137L, CD160, CD272, CEACAM5, CLEC9, CLEC91, CRTH2, CSF-1, CSF-2, CSF-3, CXCL1, CXCL2, CXCL4, CXCL12, CXCL13, CXCR3, cMet, CTLA4, DLL3, DNGR-1, E-cadherin, EGFR, ENTPD1, EpCAM, FCER1, FCER1A, FCER2, FGFR, FLAP, FOLH1, Gi24, GITR, GITRL, GPR5, HER2, HER3, ICOSL, ICOS, HHLA2, HMGB1, HVEM, IDO, IFNa, IgE, IGF1R, IL2Rbeta, IL1, IL1A, IL1B, IL1F10, IL2, IL4, IL4Ra, IL5, IL5R, IL6, IL7, IL7Ra, IL8, IL9, IL9R, IL10, rhIL10, IL12, IL13, IL13Ra1, IL13Ra2, IL15, IL17, IL17Rb, IL18, IL22, IL23, IL25, IL7, IL33, IL35, ITGB4, ITK, KIR, LAG3, LAMP1, leptin, LPFS2, MHC class 1. MUC-1, MUC-16, NCR3LG1, NKG2D, NKp46, NTPDase-1, OX40, OX40L, PD-1, PD-L1, PD-L2, PROM1, S152, SIRPalpha, SISP1, SLC, SPG64, ST2, STEAP1, STEAP2, Syk kinase, STEAP1, TROP2, TACI, TDO, T14, TIGIT, TIM3, TLR, TLR2, TLR4, TLR5, TLR9, TMEF1, TNFa, TNFRSF7, Tp55, TREM1, TSLP, TSLPR, TWEAK, VEGF, VISTA, Vstm3, WUCAM, DLL4, TGFbeta, GP100, GPRC5D, CD30 or CD16A.

[0269] In some aspects, an antigen binding polypeptide or antigen binding polypeptide complex of the invention comprises a polypeptide (e.g., a first polypeptide described herein) having a structure represented by VL1-L1-VL2-L2-VH2-L3-VH1-CL-L4-CH1 or VH1-L1-VH2-L2-VL2-L3-VL1-CL-L4-CH1, wherein L1 comprises the amino acid sequence of ggssg (SEQ ID NO:1) or a sequence having at least 50%, at least 60%, at least 70%, at least 80%, at least 90%, or at least 95% identity to SEQ ID NO:1, L2 comprises the amino acid sequence of ggggsggsgsggggsasgsg (SEQ ID NO:11) or a sequence having at least 50%, at least 60%, at least 70%, at least 80%, at least 90%, or at least 95% identity to SEQ ID NO:11, L3 comprises the amino acid sequence of ggssg (SEQ ID NO:1) or a sequence having at least 50%, at least 60%, at least 70%, at least 80%, at least 90%, or at least 95% identity to SEQ ID NO:1, and L4 comprises the amino acid sequence of ggggsggsgsggggsasgsg (SEQ ID NO: 11) or a sequence having at least 50%, at least 60%, at least 70%, at least 80%, at least 90%, or at least 95% identity to SEQ ID NO:11; VL1 is a first immunoglobulin light chain variable region that specifically binds to A2AR, APRIL, ATPDase, BAFF, BAFFR, BCMA, BlyS, BTK, BTLA, B7DC, B7H1, B7H2, B7H3, B7H4, B7H5, B7H6, B7H7, B7RP1, B7-4, C3, C5, CCL2, CCL3, CCL4, CCL5, CCL7, CCL8, CCL11, CCL15, CCL17, CCL19, CCL20, CCL21, CCL25 CCR3, CCR4, CD3, CD19, CD20, CD24, CD27, CD28, CD38, CD39, CD40, CD40L, CD47, CD52, CD70, CD80, CD86, CD123, CD133, CD137, CD137L, CD160, CD272, CEACAM5, CLEC9, CLEC91, CRTH2, CSF-1, CSF-2, CSF-3, CXCL1, CXCL2, CXCL4, CXCL12, CXCL13, CXCR3, cMet, CTLA4, DLL3, DNGR-1, E-cadherin, EGFR, ENTPD1, EpCAM, FCER1, FCER1A, FCER2, FGFR, FLAP, FOLH1, Gi24, GITR, GITRL, GPR5, HER2, HER3, ICOSL, ICOS, HHLA2, HMGB1, HVEM, IDO, IFNa, IgE, IGF1R, I2Rbeta, IL1, IL1A, IL1B, IL1F10, IL2, IL4, IL4Ra, IL5, IL5R, IL6, IL7, IL7Ra, IL8, IL9, IL9R, 110, rhIL10, IL12, IL13, IL13Ra1, IL13Ra2, IL15, 117, IL17Rb, IL18, IL22, IL23, IL25, IL7, IL33, IL35, ITGB4, ITK, KIR, LAG3, LAMP1, leptin, LPFS2, MHC class II, MUC-1, MUC-16, NCR3LG1, NKG2D, NKp46, NTPDase-1, OX40, OX40L, PD-1, PD-L1, PD-L2, PROM1, S152, SIRPalpha, SISP1, SLC, SPG64, ST2, STEAP1, STEAP2, Syk kinase, STEAP1, TROP2, TACI, TDO, T14, TIGIT, TIM3, TLR, TLR2, TLR4, TLR5, TLR9, TMEF1, TNFa, TNFRSF7, Tp55, TREM1, TSLP, TSLPR, TWEAK, VEGF, VISTA, Vstm3, WUCAM, DLL4, TGFbeta, GP100, GPRC5D, CD30 or CD16A; VL2 is a second immunoglobulin light chain variable region that specifically binds to A2AR, APRIL, ATPDase, BAFF, BAFFR, BCMA, BlyS, BTK, BTLA, B7DC, B7H1, B7H2, B7H3, B7H4, B7H5, B7H6, B7H7, B7RP1, B7-4, C3, C5, CCL2, CCL3, CCL4, CCL5, CCL7, CCL8, CCL11, CCL15, CCL17, CCL19, CCL20, CCL21, CCL25 CCR3, CCR4, CD3, CD19, CD20, CD24, CD27, CD28, CD38, CD39, CD40, CD40L, CD47, CD52, CD70, CD80, CD86, CD123, CD133, CD137, CD137L, CD160, CD272, CEACAM5, CLEC9, CLEC91, CRTH2, CSF-1, CSF-2, CSF-3, CXCL1, CXCL2, CXCL4, CXCL12, CXCL13, CXCR3, cMet, CTLA4, DLL3, DNGR-1, E-cadherin, EGFR, ENTPD1, EpCAM, FCER1, FCER1A, FCER2, FGFR, FLAP, FOLH1, Gi24, GITR, GITRL, GPR5, HER2, HER3, ICOSL, ICOS, HHLA2, HMGB1, HVEM, IDO, IFNa, IgE, IGF1R, IL2Rbeta, IL1, IL1A, IL1B, IL1F10, IL2, IL4, IL4Ra, IL5, IL5R, IL6, IL7, IL7Ra, IL8, IL9, IL9R, IL10, rhIL10, IL12, IL13, IL13Ra1, IL13Ra2, IL15, IL17, IL17Rb, IL18, IL22, IL23, IL25, IL7, IL33, IL35, ITGB4, ITK, KIR, LAG3, LAMP1, leptin, LPFS2, MHC class II, MUC-1, MUC-16, NCR3LG1, NKG2D, NKp46, NTPDase-1, OX40, OX40L, PD-1, PD-L1, PD-L2, PROM1, S152, SIRPalpha, SISP1, SLC, SPG64, ST2, STEAP1, STEAP2, Syk kinase, STEAP1, TROP2, TACI, TDO, T14, TIGIT, TIM3, TLR, TLR2, TLR4, TLR5, TLR9, TMEF1, TNFa, TNFRSF7, Tp55, TREM1, TSLP, TSLPR, TWEAK, VEGF, VISTA, Vstm3, WUCAM, DLL4, TGFbeta, GP100, GPRC5D, CD30 or CD16A; VH1 is a first immunoglobulin heavy chain variable region that specifically binds to A2AR, APRIL, ATPDase, BAFF, BAFFR, BCMA, BlyS, BTK, BTLA, B7DC, B7H1, B7H2, B7H3, B7H4, B7H5, B7H6, B7H7, B7RP1, B7-4, C3, C5, CCL2, CCL3, CCL4, CCL5, CCL7, CCL8, CCL11, CCL15, CCL17, CCL19, CCL20, CCL21, CCL25 CCR3, CCR4, CD3, CD19, CD20, CD24, CD27, CD28, CD38, CD39, CD40, CD40L, CD47, CD52, CD70, CD80, CD86, CD123, CD133, CD137, CD137L, CD160, CD272, CEACAM5, CLEC9, CLEC91, CRTH2, CSF-1, CSF-2, CSF-3, CXCL1, CXCL2, CXCL4, CXCL12, CXCL13, CXCR3, cMet, CTLA4, DLL3, DNGR-1, E-cadherin, EGFR, ENTPD1, EpCAM, FCER1, FCER1A, FCER2, FGFR, FLAP, FOLH1, Gi24, GITR, GITRL, GPR5, HER2, HER3, ICOSL, ICOS, HHLA2, HMGB1, HVEM, IDO, IFNa, IgE, IGF1R, IL2Rbeta, IL1, IL1A, IL1B, IL1F10, IL2, IL4, IL4Ra, IL5, IL5R, IL6, IL7, IL7Ra, IL8, IL9, IL9R, IL10, rhIL10, IL12, IL13, IL13Ra1, IL13Ra2, IL15, 1117, IL17Rb, IL18, IL22, IL23, IL25, IL7, IL33, IL35, ITGB4, ITK, KIR, LAG3, LAMP1, leptin, LPFS2, MHC class II, MUC-1, MUC-16, NCR3LG1, NKG2D, NKp46, NTPDase-1, OX40, OX40L, PD-1, PD-L1, PD-L2, PROM1, S152, SIRPalpha, SISP1, SLC, SPG64, ST2, STEAP1, STEAP2, Syk kinase, STEAP1, TROP2, TACI, TDO, T14, TIGIT, TIM3, TLR, TLR2, TLR4, TLR5, TLR9, TMEF1, TNFa, TNFRSF7, Tp55, TREM1, TSLP, TSLPR, TWEAK, VEGF, VISTA, Vstm3, WUCAM, DLL4, TGFbeta, GP100, GPRC5D, CD30 or CD16A; and VH2 is a second immunoglobulin heavy chain variable region that specifically binds to A2AR, APRIL, ATPDase, BAFF, BAFFR, BCMA, BlyS, BTK, BTLA, B7DC, B7H1, B7H2, B7H3, B7H4, B7H5, B7H6, B7H7, B7RP1, B7-4, C3, C5, CCL2, CCL3, CCL4, CCL5, CCL7, CCL8, CCL11, CCL15, CCL17, CCL19, CCL20, CCL21, CCL25 CCR3, CCR4, CD3, CD19, CD20, CD24, CD27, CD28, CD38, CD39, CD40, CD40L, CD47, CD52, CD70, CD80, CD86, CD123, CD133, CD137, CD137L, CD160, CD272, CEACAM5, CLEC9, CLEC91, CRTH2, CSF-1, CSF-2, CSF-3, CXCL1, CXCL2, CXCL4, CXCL12, CXCL13, CXCR3, cMet, CTLA4, DLL3, DNGR-1, E-cadherin, EGFR, ENTPD1, EpCAM, FCER1, FCER1A, FCER2, FGFR, FLAP, FOLH1, Gi24, GITR, GITRL, GPR5, HER2, HER3, ICOSL, ICOS, HHLA2, HMGB1, HVEM, IDO, IFNa, IgE, IGF1R, IL2Rbeta, IL1, IL1A, IL1B, IL1F10, IL2, IL4, IL4Ra, IL5, IL5R, IL6, IL7, IL7Ra, IL8, IL9, IL9R, IL10, rhIL10, IL12, IL13, IL13Ra1, IL13Ra2, IL15, IL17, IL17Rb, IL18, IL22, IL23, IL25, IL7, IL33, IL35, ITGB4, ITK, KIR, LAG3, LAMP1, leptin, LPFS2, MHC class II, MUC-1, MUC-16, NCR3LG1, NKG2D, NKp46, NTPDase-1, OX40, OX40L, PD-1, PD-L1, PD-L2, PROM1, S152, SIRPalpha, SISP1, SLC, SPG64, ST2, STEAP1, STEAP2, Syk kinase, STEAP1, TROP2, TACI, TDO, T14, TIGIT, TIM3, TLR, TLR2, TLR4, TLR5, TLR9, TMEF1, TNFa, TNFRSF7, Tp55, TREM1, TSLP, TSLPR, TWEAK, VEGF, VISTA, Vstm3, WUCAM, DLL4, TGFbeta, GP100, GPRC5D, CD30 or CD16A.

[0270] In some aspects, an antigen binding polypeptide or antigen binding polypeptide complex of the invention comprises a polypeptide (e.g., a first polypeptide described herein) having a structure represented by VL1-L1-VL2-L2-VH2-L3-VH1-CH1-Fc, VH1-L1-VH2-L2-VL2-L3-VL1-CH1-Fc, VL1-L1-VL2-L2-VH2-L3-VH1-CL-Fc, or VH1-L1-VH2-L2-VL2-L3-VL1-CL-Fc, wherein L1 comprises the amino acid sequence of ggssg (SEQ ID NO:1) or a sequence having at least 50%, at least 60%, at least 70%, at least 80%, at least 90%, or at least 95% identity to SEQ ID NO:1, L2 comprises the amino acid sequence of ggggsggsgsggggsasgsg (SEQ ID NO:11) or a sequence having at least 50%, at least 60%, at least 70%, at least 80%, at least 90%, or at least 95% identity to SEQ ID NO:11, and L3 comprises the amino acid sequence of ggssg (SEQ ID NO:1) or a sequence having at least 50%, at least 60%, at least 70%, at least 80%, at least 90%, or at least 95% identity to SEQ ID NO:1; VL1 is a first immunoglobulin light chain variable region that specifically binds to A2AR, APRIL, ATPDase, BAFF, BAFFR, BCMA, BlyS, BTK, BTLA, B7DC, B7H1, B7H2, B7H3, B7H4, B7H5, B7H6, B7H7, B7RP1, B7-4, C3, C5, CCL2, CCL3, CCL4, CCL5, CCL7, CCL8, CCL11, CCL15, CCL17, CCL19, CCL20, CCL21, CCL25 CCR3, CCR4, CD3, CD19, CD20, CD24, CD27, CD28, CD38, CD39, CD40, CD40L, CD47, CD52, CD70, CD80, CD86, CD123, CD133, CD137, CD137L, CD160, CD272, CEACAM5, CLEC9, CLEC91, CRTH2, CSF-1, CSF-2, CSF-3, CXCL1, CXCL2, CXCL4, CXCL12, CXCL13, CXCR3, cMet, CTLA4, DLL3, DNGR-1, E-cadherin, EGFR, ENTPD1, EpCAM, FCER1, FCER1A, FCER2, FGFR, FLAP, FOLH1, Gi24, GITR, GITRL, GPR5, HER2, HER3, ICOSL, ICOS, HHLA2, HMGB1, HVEM, IDO, IFNa, IgE, IGF1R, IL2Rbeta, IL1, IL1A, IL1B, IL1F10, IL2, IL4, IL4Ra, IL5, IL5R, IL6, IL7, IL7Ra, IL8, IL9, IL9R, IL10, rhIL10, IL12, IL13, IL13Ra1, IL13Ra2, IL15, IL17, IL17Rb, IL18, IL22, IL23, IL25, IL7, IL33, IL35, ITGB4, ITK, KIR, LAG3, LAMP1, leptin, LPFS2, MHC class II, MUC-1, MUC-16, NCR3LG1, NKG2D, NKp46, NTPDase-1, OX40, OX40L, PD-1, PD-L1, PD-L2, PROM1, S152, SIRPalpha, SISP1, SLC, SPG64, ST2, STEAP1, STEAP2, Syk kinase, STEAP1, TROP2, TACI, TDO, T14, TIGIT, TIM3, TLR, TLR2, TLR4, TLR5, TLR9, TMEF1, TNFa, TNFRSF7, Tp55, TREM1, TSLP, TSLPR, TWEAK, VEGF, VISTA, Vstm3, WUCAM, DLL4, TGFbeta, GP100, GPRC5D, CD30 or CD16A; VL2 is a second immunoglobulin light chain variable region that specifically binds to A2AR, APRIL, ATPDase, BAFF, BAFFR, BCMA, BlyS, BTK, BTLA, B7DC, B7H1, B7H2, B7H3, B7H4, B7H5, B7H6, B7H7, B7RP1, B7-4, C3, C5, CCL2, CCL3, CCL4, CCL5, CCL7, CCL8, CCL11, CCL15, CCL17, CCL19, CCL20, CCL21, CCL25 CCR3, CCR4, CD3, CD19, CD20, CD24, CD27, CD28, CD38, CD39, CD40, CD40L, CD47, CD52, CD70, CD80, CD86, CD123, CD133, CD137, CD137L, CD160, CD272, CEACAM5, CLEC9, CLEC91, CRTH2, CSF-1, CSF-2, CSF-3, CXCL1, CXCL2, CXCL4, CXCL12, CXCL13, CXCR3, cMet, CTLA4, DLL3, DNGR-1, E-cadherin, EGFR, ENTPD1, EpCAM, FCER1, FCER1A, FCER2, FGFR, FLAP, FOLH1, Gi24, GITR, GITRL, GPR5, HER2, HER3, ICOSL, ICOS, HHLA2, HMGB1, HVEM, IDO, IFNa, IgE, IGF1R, IL2Rbeta, IL1, IL1A, IL1B, IL1F10, IL2, IL4, IL4Ra, IL5, IL5R, IL6, IL7, IL7Ra, IL8, IL9, IL9R, IL10, rhIL10, IL12, IL13, IL13Ra1, IL13Ra2, IL15, IL17, IL17Rb, IL18, IL22, IL23, IL25, IL7, IL33, IL35, ITGB4, ITK, KIR, LAG3, LAMP1, leptin, LPFS2, MHC class II, MUC-1, MUC-16, NCR3LG1, NKG2D, NKp46, NTPDase-1, OX40, OX40L, PD-1, PD-L1, PD-L2, PROM1, S152, SIRPalpha, SISP1, SLC, SPG64, ST2, STEAP1, STEAP2, Syk kinase, STEAP1, TROP2, TACI, TDO, T14, TIGIT, TIM3, TLR, TLR2, TLR4, TLR5, TLR9, TMEF1, TNFa, TNFRSF7, Tp55, TREM1, TSLP, TSLPR, TWEAK, VEGF, VISTA, Vstm3, WUCAM, DLL4, TGFbeta, GP100, GPRC5D, CD30 or CD16A; VH1 is a first immunoglobulin heavy chain variable region that specifically binds to A2AR, APRIL, ATPDase, BAFF, BAFFR, BCMA, BlyS, BTK, BTLA, B7DC, B7H1, B7H2, B7H3, B7H4, B7H5, B7H6, B7H7, B7RP1, B7-4, C3, C5, CCL2, CCL3, CCL4, CCL5, CCL7, CCL8, CCL11, CCL15, CCL17, CCL19, CCL20, CCL21, CCL25 CCR3, CCR4, CD3, CD19, CD20, CD24, CD27, CD28, CD38, CD39, CD40, CD40L, CD47, CD52, CD70, CD80, CD86, CD123, CD133, CD137, CD137L, CD160, CD272, CEACAM5, CLEC9, CLEC91, CRTH2, CSF-1, CSF-2, CSF-3, CXCL1, CXCL2, CXCL4, CXCL12, CXCL13, CXCR3, cMet, CTLA4, DLL3, DNGR-1, E-cadherin, EGFR, ENTPD1, EpCAM, FCER1, FCER1A, FCER2, FGFR, FLAP, FOLH1, Gi24, GITR, GITRL, GPR5, HER2, HER3, ICOSL, ICOS, HHLA2, HMGB1, HVEM, IDO, IFNa, IgE, IGF1R, IL2Rbeta, IL1, IL1A, IL1B, IL1F10, IL2, IL4, IL4Ra, IL5, IL5R, IL6, IL7, IL7Ra, IL8, IL9, IL9R, IL10, rhIL10, IL12, IL13, IL13Ra1, IL13Ra2, IL15, IL17, IL17Rb, IL18, IL22, IL23, IL25, IL7, IL33, IL35, ITGB4, ITK, KIR, LAG3, LAMP1, leptin, LPFS2, MHC class II, MUC-1, MUC-16, NCR3LG1, NKG2D, NKp46, NTPDase-1, OX40, OX40L, PD-1, PD-L1, PD-L2, PROM1, S152, SIRPalpha, SISP1, SLC, SPG64, ST2, STEAP1, STEAP2, Syk kinase, STEAP1, TROP2, TACI, TDO, T14, TIGIT, TIM3, TLR, TLR2, TLR4, TLR5, TLR9, TMEF1, TNFa, TNFRSF7, Tp55, TREM1, TSLP, TSLPR, TWEAK, VEGF, VISTA, Vstm3, WUCAM, DLL4, TGFbeta, GP100, GPRC5D, CD30 or CD16A; and VH2 is a second immunoglobulin heavy chain variable region that specifically binds to A2AR, APRIL, ATPDase, BAFF, BAFFR, BCMA, BlyS, BTK, BTLA, B7DC, B7H1, B7H2, B7H3, B7H4, B7H5, B7H6, B7H7, B7RP1, B7-4, C3, C5, CCL2, CCL3, CCL4, CCL5, CCL7, CCL8, CCL11, CCL15, CCL17, CCL19, CCL20, CCL21, CCL25 CCR3, CCR4, CD3, CD19, CD20, CD24, CD27, CD28, CD38, CD39, CD40, CD40L, CD47, CD52, CD70, CD80, CD86, CD123, CD133, CD137, CD137L, CD160, CD272, CEACAM5, CLEC9, CLEC91, CRTH2, CSF-1, CSF-2, CSF-3, CXCL1, CXCL2, CXCL4, CXCL12, CXCL13, CXCR3, cMet, CTLA4, DLL3, DNGR-1, E-cadherin, EGFR, ENTPD1, EpCAM, FCER1, FCER1A, FCER2, FGFR, FLAP, FOLH1, Gi24, GITR, GITRL, GPR5, HER2, HER3, ICOSL, ICOS, HHLA2, HMGB1, HVEM, IDO, IFNa, IgE, IGF1R, IL2Rbeta, IL1, IL1A, IL1B, IL1F10, IL2, IL4, IL4Ra, IL5, IL5R, IL6, IL7, IL7Ra, IL8, IL9, IL9R, IL10, rhIL10, IL12, IL13, IL13Ra1, IL13Ra2, IL15, IL17, IL17Rb, IL18, IL22, IL23, IL25, IL7, IL33, IL35, ITGB4, ITK, KIR, LAG3, LAMP1, leptin, LPFS2, MHC class II, MUC-1, MUC-16, NCR3LG1, NKG2D, NKp46, NTPDase-1, OX40, OX40L, PD-1, PD-L1, PD-L2, PROM1, S1S2, SIRPalpha, SISP1, SLC, SPG64, ST2, STEAP1, STEAP2, Syk kinase, STEAP1, TROP2, TACI, TDO, T14, TIGIT, TIM3, TLR, TLR2, TLR4, TLRS, TLR9, TMEF1, TNFa, TNFRSF7, Tp55, TREM1, TSLP, TSLPR, TWEAK, VEGF, VISTA, Vstm3, WUCAM, DLL4, TGFbeta, GP100, GPRC5D, CD30 or CD16A.

[0271] In some aspects, an antigen binding polypeptide or antigen binding polypeptide complex of the invention comprises a polypeptide (e.g., a first polypeptide described herein) having a structure represented by VL1-L1-VL2-L2-VH2-L3-VH1-L4-CH1-Fc, VH1-L1-VH2-L2-VL2-L3-VL1-L4-CH1-Fc, VL1-L1-VL2-L2-VH2-L3-VH1-L4-CL-Fc, or VH1-L1-VH2-L2-VL2-L3-VL1-L4-CL-Fc, wherein L1 comprises the amino acid sequence of ggssg (SEQ ID NO:1) or a sequence having at least 50%, at least 60%, at least 70%, at least 80%, at least 90%, or at least 95% identity to SEQ ID NO:1, L2 comprises the amino acid sequence of ggggsggsgsggggsasgsg (SEQ ID NO:11) or a sequence having at least 50%, at least 60%, at least 70%, at least 80%, at least 90%, or at least 95% identity to SEQ ID NO:11, L3 comprises the amino acid sequence of ggssg (SEQ ID NO: 1) or a sequence having at least 50%, at least 60%, at least 70%, at least 80%, at least 90%, or at least 95% identity to SEQ ID NO:1, and L4 comprises the amino acid sequence of gssgs (SEQ ID NO:2) or a sequence having at least 50%, at least 60%, at least 70%, at least 80%, at least 90%, or at least 95% identity to SEQ ID NO:2; VL1 is a first immunoglobulin light chain variable region that specifically binds to A2AR, APRIL, ATPDase, BAFF, BAFFR, BCMA, BlyS, BTK, BTLA, B7DC, B7H1, B7H2, B7H3, B7H4, B7H5, B7H6, B7H7, B7RP1, B7-4, C3, C5, CCL2, CCL3, CCL4, CCL5, CCL7, CCL8, CCL11, CCL15, CCL17, CCL19, CCL20, CCL21, CCL25 CCR3, CCR4, CD3, CD19, CD20, CD24, CD27, CD28, CD38, CD39, CD40, CD40L, CD47, CD52, CD70, CD80, CD86, CD123, CD133, CD137, CD137L, CD160, CD272, CEACAM5, CLEC9, CLEC91, CRTH2, CSF-1, CSF-2, CSF-3, CXCL1, CXCL2, CXCL4, CXCL12, CXCL13, CXCR3, cMet, CTLA4, DLL3, DNGR-1, E-cadherin, EGFR, ENTPD1, EpCAM, FCER1, FCER1A, FCER2, FGFR, FLAP, FOLH1, Gi24, GITR, GITRL, GPR5, HER2, HER3, ICOSL, ICOS, HHLA2, HMGB1, HVEM, IDO, IFNa, IgE, IGF1R, IL2Rbeta, IL1, IL1A, IL1B, ILF10, IL2, 114, IL4Ra, IL5, IL5R, IL6, IL7, IL7Ra, IL8, IL9, IL9R, IL10, rhIL10, IL12, IL13, IL13Ra1, IL13Ra2, IL15, IL17, IL17Rb, IL18, IL22, IL23, IL25, IL7, IL33, IL35, ITGB4, ITK, KIR, LAG3, LAMP1, leptin, LPFS2, MHC class II, MUC-1, MUC-16, NCR3LG1, NKG2D, NKp46, NTPDase-1, OX40, OX40L, PD-1, PD-L1, PD-L2, PROM1, S152, SIRPalpha, SISP1, SLC, SPG64, ST2, STEAP1, STEAP2, Syk kinase, STEAP1, TROP2, TACI, TDO, T14, TIGIT, TIM3, TLR, TLR2, TLR4, TLR5, TLR9, TMEF1, TNFa, TNFRSF7, Tp55, TREM1, TSLP, TSLPR, TWEAK, VEGF, VISTA, Vstm3, WUCAM, DLL4, TGFbeta, GP100, GPRC5D, CD30 or CD16A; VL2 is a second immunoglobulin light chain variable region that specifically binds to A2AR, APRIL, ATPDase, BAFF, BAFFR, BCMA, BlyS, BTK, BTLA, B7DC, B7H1, B7H2, B7H3, B7H4, B7H5, B7H6, B7H7, B7RP1, B7-4, C3, C5, CCL2, CCL3, CCL4, CCL5, CCL7, CCL8, CCL11, CCL15, CCL17, CCL19, CCL20, CCL21, CCL25 CCR3, CCR4, CD3, CD19, CD20, CD24, CD27, CD28, CD38, CD39, CD40, CD40L, CD47, CD52, CD70, CD80, CD86, CD123, CD133, CD137, CD137L, CD160, CD272, CEACAM5, CLEC9, CLEC91, CRTH2, CSF-1, CSF-2, CSF-3, CXCL1, CXCL2, CXCL4, CXCL12, CXCL13, CXCR3, cMet, CTLA4, DLL3, DNGR-1, E-cadherin, EGFR, ENTPD1, EpCAM, FCER1, FCER1A, FCER2, FGFR, FLAP, FOLH1, Gi24, GITR, GITRL, GPR5, HER2, HER3, ICOSL, ICOS, HHLA2, HMGB1, HVEM, IDO, IFNa, IgE, IGF1R, IL2Rbeta, IL1, IL1A, IL1B, IL1F10, IL2, IL4, IL4Ra, IL5, IL5R, IL16, IL7, IL7Ra, IL8, IL9, IL9R, I110, rhIL10, IL12, IL13, IL13Ra1, IL13Ra2, IL15, IL17, IL17Rb, IL18, IL22, IL23, IL25, IL7, 1133, IL35, ITGB4, ITK, KIR, LAG3, LAMP1, leptin, LPFS2, MHC class II, MUC-1, MUC-16, NCR3LG1, NKG2D, NKp46, NTPDase-1, OX40, OX40L, PD-1, PD-L1, PD-L2, PROM1, S1S2, SIRPalpha, SISP1, SLC, SPG64, ST2, STEAP1, STEAP2, Syk kinase, STEAP1, TROP2, TACI, TDO, T14, TIGIT, TIM3, TLR, TLR2, TLR4, TLR5, TLR9, TMEF1, TNFa, TNFRSF7, Tp55, TREM1, TSLP, TSLPR, TWEAK, VEGF, VISTA, Vstm3, WUCAM, DLL4, TGFbeta, GP100, GPRC5D, CD30 or CD16A; VH1 is a first immunoglobulin heavy chain variable region that specifically binds to A2AR, APRIL, ATPDase, BAFF, BAFFR, BCMA, BlyS, BTK, BTLA, B7DC, B7H1, B7H2, B7H3, B7H4, B7H5, B7H6, B7H7, B7RP1, B7-4, C3, C5, CCL2, CCL3, CCL4, CCL5, CCL7, CCL8, CCL11, CCL15, CCL17, CCL19, CCL20, CCL21, CCL25 CCR3, CCR4, CD3, CD19, CD20, CD24, CD27, CD28, CD38, CD39, CD40, CD40L, CD47, CD52, CD70, CD80, CD86, CD123, CD133, CD137, CD137L, CD160, CD272, CEACAM5, CLEC9, CLEC91, CRTH2, CSF-1, CSF-2, CSF-3, CXCL1, CXCL2, CXCL4, CXCL12, CXCL13, CXCR3, cMet, CTLA4, DLL3, DNGR-1, E-cadherin, EGFR, ENTPD1, EpCAM, FCER1, FCER1A, FCER2, FGFR, FLAP, FOLH1, Gi24, GITR, GITRL, GPR5, HER2, HER3, ICOSL, ICOS, HHLA2, HMGB1, HVEM, IDO, IFNa, IgE, IGF1R, IL2Rbeta, IL1, IL1A, IL1B, IL1F10, IL12, IL14, I14Ra, IL5, IL5R, IL16, 117, IL7Ra, 118, 119, IL9R, IL10, rhIL10, IL12, IL13, I13Ra1, IL13Ra2, IL15, IL17, IL17Rb, IL18, IL22, IL23, IL25, 117, IL33, IL35, ITGB4, ITK, KIR, LAG3, LAMP1, leptin, LPFS2, MHC class II, MUC-1, MUC-16, NCR3LG1, NKG2D, NKp46, NTPDase-1, OX40, OX40L, PD-1, PD-L1, PD-L2, PROM1, S152, SIRPalpha, SISP1, SLC, SPG64, ST2, STEAP1, STEAP2, Syk kinase, STEAP1, TROP2, TACI, TDO, T14, TIGIT, TIM3, TLR, TLR2, TLR4, TLRS, TLR9, TMEF1, TNFa, TNFRSF7, Tp55, TREM1, TSLP, TSLPR, TWEAK, VEGF, VISTA, Vstm3, WUCAM, DLL4, TGFbeta, GP100, GPRC5D, CD30 or CD16A; and VH2 is a second immunoglobulin heavy chain variable region that specifically binds to A2AR, APRIL, ATPDase, BAFF, BAFFR, BCMA, BlyS, BTK, BTLA, B7DC, B7H1, B7H2, B7H3, B7H4, B7H5, B7H6, B7H7, B7RP1, B7-4, C3, C5, CCL2, CCL3, CCL4, CCL5, CCL7, CCL8, CCL11, CCL15, CCL17, CCL19, CCL20, CCL21, CCL25 CCR3, CCR4, CD3, CD19, CD20, CD24, CD27, CD28, CD38, CD39, CD40, CD40L, CD47, CD52, CD70, CD80, CD86, CD123, CD133, CD137, CD137L, CD160, CD272, CEACAM5, CLEC9, CLEC91, CRTH2, CSF-1, CSF-2, CSF-3, CXCL1, CXCL2, CXCL4, CXCL12, CXCL13, CXCR3, cMet, CTLA4, DLL3, DNGR-1, E-cadherin, EGFR, ENTPD1, EpCAM, FCER1, FCER1A, FCER2, FGFR, FLAP, FOLH1, Gi24, GITR, GITRL, GPR5, HER2, HER3, ICOSL, ICOS, HHLA2, HMGB1, HVEM, IDO, IFNa, IgE, IGF1R, IL2Rbeta, IL1, IL1A, IL1B, IL1F10, IL2, IL4, IL4Ra, IL5, IL5R, IL6, IL7, IL7Ra, IL8, IL9, IL9R, IL10, rhIL10, IL12, IL13, IL13Ra1, IL13Ra2, IL15, IL17, IL17Rb, IL18, IL22, IL23, IL25, IL7, IL33, IL35, ITGB4, ITK, KIR, LAG3, LAMP1, leptin, LPFS2, MHC class II, MUC-1, MUC-16, NCR3LG1, NKG2D, NKp46, NTPDase-1, OX40, OX40L, PD-1, PD-L1, PD-L2, PROM1, S1S2, SIRPalpha, SISP1, SLC, SPG64, ST2, STEAP1, STEAP2, Syk kinase, STEAP1, TROP2, TACI, TDO, T14, TIGIT, TIM3, TLR, TLR2, TLR4, TLR5, TLR9, TMEF1, TNFa, TNFRSF7, Tp55, TREM1, TSLP, TSLPR, TWEAK, VEGF, VISTA, Vstm3, WUCAM, DLL4, TGFbeta, GP100, GPRC5D, CD30 or CD16A.

[0272] In some aspects, an antigen binding polypeptide complex of the invention comprises a polypeptide (e.g., a second or third polypeptide described herein) having a structure represented by VL3-L4-VH3 or VH3-L4-VL3, wherein L4 comprises the amino acid sequence of ggggsggsgsggggsasgsg (SEQ ID NO:11) or a sequence having at least 50%, at least 60%, at least 70%, at least 80%, at least 90%, or at least 95% identity to SEQ ID NO: 11; VL3 is a third immunoglobulin light chain variable region that specifically binds to A2AR, APRIL, ATPDase, BAFF, BAFFR, BCMA, BlyS, BTK, BTLA, B7DC, B7H1, B7H2, B7H3, B7H4, B7H5, B7H6, B7H7, B7RP1, B7-4, C3, C5, CCL2, CCL3, CCL4, CCL5, CCL7, CCL8, CCL11, CCL15, CCL17, CCL19, CCL20, CCL21, CCL25 CCR3, CCR4, CD3, CD19, CD20, CD24, CD27, CD28, CD38, CD39, CD40, CD40L, CD47, CD52, CD70, CD80, CD86, CD123, CD133, CD137, CD137L, CD160, CD272, CEACAM5, CLEC9, CLEC91, CRTH2, CSF-1, CSF-2, CSF-3, CXCL1, CXCL2, CXCL4, CXCL12, CXCL13, CXCR3, cMet, CTLA4, DLL3, DNGR-1, E-cadherin, EGFR, ENTPD1, EpCAM, FCER1, FCER1A, FCER2, FGFR, FLAP, FOLH1, Gi24, GITR, GITRL, GPR5, HER2, HER3, ICOSL, ICOS, HHLA2, HMGB1, HVEM, IDO, IFNa, IgE, IGF1R, I2Rbeta, IL1, IL1A, IL1B, IL1F10, IL2, IL4, IL4Ra, IL5, IL5R, IL6, IL7, IL7Ra, IL8, IL9, IL9R, IL10, rhIL10, IL12, IL13, IL13Ra1, IL13Ra2, IL15, IL17, IL17Rb, IL18, IL22, IL23, IL25, IL7, IL33, IL35, ITGB4, ITK, KIR, LAG3, LAMP1, leptin, LPFS2, MHC class II, MUC-1, MUC-16, NCR3LG1, NKG2D, NKp46, NTPDase-1, OX40, OX40L, PD-1, PD-L1, PD-L2, PROM1, S1S2, SIRPalpha, SISP1, SLC, SPG64, ST2, STEAP1, STEAP2, Syk kinase, STEAP1, TROP2, TACI, TDO, T14, TIGIT, TIM3, TLR, TLR2, TLR4, TLR5, TLR9, TMEF1, TNFa, TNFRSF7, Tp55, TREM1, TSLP, TSLPR, TWEAK, VEGF, VISTA, Vstm3, WUCAM, DLL4, TGFbeta, GP100, GPRC5D, CD30 or CD16A; and VH3 is a third immunoglobulin heavy chain variable region that specifically binds to A2AR, APRIL, ATPDase, BAFF, BAFFR, BCMA, BlyS, BTK, BTLA, B7DC, B7H1, B7H2, B7H3, B7H4, B7H5, B7H6, B7H7, B7RP1, B7-4, C3, C5, CCL2, CCL3, CCL4, CCL5, CCL7, CCL8, CCL11, CCL15, CCL17, CCL19, CCL20, CCL21, CCL25 CCR3, CCR4, CD3, CD19, CD20, CD24, CD27, CD28, CD38, CD39, CD40, CD40L, CD47, CD52, CD70, CD80, CD86, CD123, CD133, CD137, CD137L, CD160, CD272, CEACAM5, CLEC9, CLEC91, CRTH2, CSF-1, CSF-2, CSF-3, CXCL1, CXCL2, CXCL4, CXCL12, CXCL13, CXCR3, cMet, CTLA4, DLL3, DNGR-1, E-cadherin, EGFR, ENTPD1, EpCAM, FCER1, FCER1A, FCER2, FGFR, FLAP, FOLH1, Gi24, GITR, GITRL, GPR5, HER2, HER3, ICOSL, ICOS, HHLA2, HMGB1, HVEM, IDO, IFNa, IgE, IGF1R, IL2Rbeta, IL1, IL1A, IL1B, IL1F10, IL2, IL4, IL4Ra, IL5, IL5R, IL6, IL7, IL7Ra, IL8, IL9, IL9R, IL10, rhIL10, IL12, IL13, IL13Ra1, IL13Ra2, IL15, IL17, IL17Rb, IL18, IL22, IL23, IL25, IL7, IL33, IL35, ITGB4, ITK, KIR, LAG3, LAMP1, leptin, LPFS2, MHC class II, MUC-1, MUC-16, NCR3LG1, NKG2D, NKp46, NTPDase-1, OX40, OX40L, PD-1, PD-L1, PD-L2, PROM1, S152, SIRPalpha, SISP1, SLC, SPG64, ST2, STEAP1, STEAP2, Syk kinase, STEAP1, TROP2, TACI, TDO, T14, TIGIT, TIM3, TLR, TLR2, TLR4, TLR5, TLR9, TMEF1, TNFa, TNFRSF7, Tp55, TREM1, TSLP, TSLPR, TWEAK, VEGF, VISTA, Vstm3, WUCAM, DLL4, TGFbeta, GP100, GPRC5D, CD30 or CD16A.

[0273] In another aspect, the antigen binding polypeptide complex comprises a second polypeptide having a structure represented by VL3-L4-VH3-L5 or VH3-L4-L5, wherein L4 comprises the amino acid sequence of ggggsggsgsggggsasgsg (SEQ ID NO:l 1) or a sequence having at least 50%, at least 60%, at least 70%, at least 80%, at least 90%, or at least 95% identity to SEQ ID NO: 11, and L5 comprises the amino acid sequence of asggsg (SEQ ID NO:6) or a sequence having at least 50%, at least 60%, at least 70%, at least 80%, at least 90%, or at least 95% identity to SEQ ID NO:6; VL3 is a third immunoglobulin light chain variable region that specifically binds to A2AR, APRIL, ATPDase, BAFF, BAFFR, BCMA, BlyS, BTK, BTLA, B7DC, B7H1, B7H2, B7H3, B7H4, B7H5, B7H6, B7H7, B7RP1, B7-4, C3, C5, CCL2, CCL3, CCL4, CCL5, CCL7, CCL8, CCLI1, CCL15, CCL17, CCL19, CCL20, CCL21, CCL25 CCR3, CCR4, CD3, CD19, CD20, CD24, CD27, CD28, CD38, CD39, CD40, CD40L, CD47, CD52, CD70, CD80, CD86, CD123, CD133, CD137, CD137L, CD160, CD272, CEACAM5, CLEC9, CLEC91, CRTH2, CSF-1, CSF-2, CSF-3, CXCL1, CXCL2, CXCL4, CXCL12, CXCL13, CXCR3, cMet, CTLA4, DLL3, DNGR-1, E-cadherin, EGFR, ENTPD1, EpCAM, FCER1, FCER1A, FCER2, FGFR, FLAP, FOLH1, Gi24, GITR, GITRL, GPR5, HER2, HER3, ICOSL, ICOS, HHLA2, HMGB1, HVEM, IDO, IFNa, IgE, IGF1R, IL2Rbeta, IL1, IL1A, IL1B, IL1F10, IL2, IL4, IL4Ra, IL5, IL5R, IL6, IL7, IL7Ra, IL8, I9, IL9R, IL10, rhIL10, IL12, IL13, IL13Ra1, IL13Ra2, IL15, IL17, IL17Rb, IL18, IL22, IL23, IL25, IL7, IL33, IL35, ITGB4, ITK, KIR, LAG3, LAMP1, leptin, LPFS2, MHC class II, MUC-1, MUC-16, NCR3LG1, NKG2D, NKp46, NTPDase-1, OX40, OX40L, PD-1, PD-L1, PD-L2, PROM1, S152, SIRPalpha, SISP1, SLC, SPG64, ST2, STEAP1, STEAP2, Syk kinase, STEAP1, TROP2, TACI, TDO, T14, TIGIT, TIM3, TLR, TLR2, TLR4, TLR5, TLR9, TMEF1, TNFa, TNFRSF7, Tp55, TREM1, TSLP, TSLPR, TWEAK, VEGF, VISTA, Vstm3, WUCAM, DLL4, TGFbeta, GP100, GPRC5D, CD30 or CD16A; and VH3 is a third immunoglobulin heavy chain variable region that specifically binds to human CD3, CD19, CD28 or CD38.

[0274] In some aspects, an antigen binding polypeptide complex of the invention comprises a polypeptide (e.g., a second or third polypeptide described herein) having a structure represented by VL3-CL-L1-VH3-CH1-Fc, VH3-CL-L1-VL3-CH1-Fc, VL3-CH1-L1-VH3-CL-Fc, or VH3-CH1-L1-VL3-CL-Fc, wherein L1 comprises the amino acid sequence of GGGGSGGGGSGGGGSGGGGSGGGGSGGGGSGGGGSGGGGS (SEQ ID NO:16) or a sequence having at least 50%, at least 60%, at least 70%, at least 80%, at least 90%, or at least 95% identity to SEQ ID NO:16; VL3 is a third immunoglobulin light chain variable region that specifically binds to A2AR, APRIL, ATPDase, BAFF, BAFFR, BCMA, BlyS, BTK, BTLA, B7DC, B7H1, B7H2, B7H3, B7H4, B7H5, B7H6, B7H7, B7RP1, B7-4, C3, C5, CCL2, CCL3, CCL4, CCL5, CCL7, CCL8, CCL11, CCL15, CCL17, CCL19, CCL20, CCL21, CCL25 CCR3, CCR4, CD3, CD19, CD20, CD24, CD27, CD28, CD38, CD39, CD40, CD40L, CD47, CD52, CD70, CD80, CD86, CD123, CD133, CD137, CD137L, CD160, CD272, CEACAM5, CLEC9, CLEC91, CRTH2, CSF-1, CSF-2, CSF-3, CXCL1, CXCL2, CXCL4, CXCL12, CXCL13, CXCR3, cMet, CTLA4, DLL3, DNGR-1, E-cadherin, EGFR, ENTPD1, EpCAM, FCER1, FCER1A, FCER2, FGFR, FLAP, FOLH1, Gi24, GITR, GITRL, GPR5, HER2, HER3, ICOSL, ICOS, HHLA2, HMGB1, HVEM, IDO, IFNa, IgE, IGF1R, IL2Rbeta, IL1, IL1A, IL1B, IL1F10, IL2, IL4, IL4Ra, IL5, IL5R, IL6, IL7, IL7Ra, IL8, IL9, IL9R, IL10, rhIL10, IL12, IL13, IL13Ra1, IL13Ra2, IL15, IL17, IL17Rb, IL18, IL22, IL23, IL25, IL7, IL33, IL35, ITGB4, ITK, KIR, LAG3, LAMP1, leptin, LPFS2, MHC class II, MUC-1, MUC-16, NCR3LG1, NKG2D, NKp46, NTPDase-1, OX40, OX40L, PD-1, PD-L1, PD-L2, PROM1, S152, SIRPalpha, SISP1, SLC, SPG64, ST2, STEAP1, STEAP2, Syk kinase, STEAP1, TROP2, TACI, TDO, T14, TIGIT, TIM3, TLR, TLR2, TLR4, TLR5, TLR9, TMEF1, TNFa, TNFRSF7, Tp55, TREM1, TSLP, TSLPR, TWEAK, VEGF, VISTA, Vstm3, WUCAM, DLL4, TGFbeta, GP100, GPRC5D, CD30 or CD16A; and VH3 is a third immunoglobulin heavy chain variable region that specifically binds to A2AR, APRIL, ATPDase, BAFF, BAFFR, BCMA, BlyS, BTK, BTLA, B7DC, B7H1, B7H2, B7H3, B7H4, B7H5, B7H6, B7H7, B7RP1, B7-4, C3, C5, CCL2, CCL3, CCL4, CCL5, CCL7, CCL8, CCL11, CCL15, CCL17, CCL19, CCL20, CCL21, CCL25 CCR3, CCR4, CD3, CD19, CD20, CD24, CD27, CD28, CD38, CD39, CD40, CD40L, CD47, CD52, CD70, CD80, CD86, CD123, CD133, CD137, CD137L, CD160, CD272, CEACAM5, CLEC9, CLEC91, CRTH2, CSF-1, CSF-2, CSF-3, CXCL1, CXCL2, CXCL4, CXCL12, CXCL13, CXCR3, cMet, CTLA4, DLL3, DNGR-1, E-cadherin, EGFR, ENTPD1, EpCAM, FCER1, FCER1A, FCER2, FGFR, FLAP, FOLH1, Gi24, GITR, GITRL, GPR5, HER2, HER3, ICOSL, ICOS, HHLA2, HMGB1, HVEM, IDO, IFNa, IgE, IGF1R, IL2Rbeta, IL1, IL1A, IL1B, IL1F10, IL2, IL4, IL4Ra, IL5, IL5R, IL6, IL7, IL7Ra, IL8, IL9, IL9R, IL10, rhIL10, IL12, IL13, IL13Ra1, IL13Ra2, IL15, IL17, IL17Rb, IL18, IL22, IL23, IL25, IL7, IL33, IL35, ITGB4, ITK, KIR, LAG3, LAMP1, leptin, LPFS2, MHC class II, MUC-1, MUC-16, NCR3LG1, NKG2D, NKp46, NTPDase-1, OX40, OX40L, PD-1, PD-L1, PD-L2, PROM1, S152, SIRPalpha, SISP1, SLC, SPG64, ST2, STEAP1, STEAP2, Syk kinase, STEAP1, TROP2, TACI, TDO, T14, TIGIT, TIM3, TLR, TLR2, TLR4, TLR5, TLR9, TMEF1, TNFa, TNFRSF7, Tp55, TREM1, TSLP, TSLPR, TWEAK, VEGF, VISTA, Vstm3, WUCAM, DLL4, TGFbeta, GP100, GPRC5D, CD30 or CD16A.

[0275] In some aspects, an antigen binding polypeptide complex of the invention comprises a polypeptide (e.g., a second or third polypeptide described herein) having a structure represented by VL3-L1-VH3-CH1-L2-CL-Fc, VH3-L1-VL3-CH1-L2-CL-Fc, VL3-L1-VH3-CL-L2-CH1-Fc, or VH3-L1-VL3-CL-L2-CH1-Fc, wherein L1 and L2 comprise the amino acid sequence of ggggsggsgsggggsasgsg (SEQ ID NO:11), ggsggsgsgggsasgsg (SEQ ID NO:19), or a sequence having at least 50%, at least 60%, at least 70%, at least 80%, at least 90%, or at least 95% identity to SEQ ID NO:11 or SEQ ID NO: 19; VL3 is a third immunoglobulin light chain variable region that specifically binds to A2AR, APRIL, ATPDase, BAFF, BAFFR, BCMA, BlyS, BTK, BTLA, B7DC, B7H1, B7H2, B7H3, B7H4, B7H5, B7H6, B7H7, B7RP1, B7-4, C3, C5, CCL2, CCL3, CCL4, CCL5, CCL7, CCL8, CCL11, CCL15, CCL17, CCL19, CCL20, CCL21, CCL25 CCR3, CCR4, CD3, CD19, CD20, CD24, CD27, CD28, CD38, CD39, CD40, CD40L, CD47, CD52, CD70, CD80, CD86, CD123, CD133, CD137, CD137L, CD160, CD272, CEACAM5, CLEC9, CLEC91, CRTH2, CSF-1, CSF-2, CSF-3, CXCL1, CXCL2, CXCL4, CXCL12, CXCL13, CXCR3, cMet, CTLA4, DLL3, DNGR-1, E-cadherin, EGFR, ENTPD1, EpCAM, FCER1, FCER1A, FCER2, FGFR, FLAP, FOLH1, Gi24, GITR, GITRL, GPR5, HER2, HER3, ICOSL, ICOS, HHLA2, HMGB1, HVEM, IDO, IFNa, IgE, IGF1R, IL2Rbeta, IL1, IL1A, IL1B, IL1F10, IL2, R4, IL4Ra, IL5, IL5R, IL6, IL7, IL7Ra, IL8, IL9, IL9R, IL10, rhIL10, IR12, IL13, IL13Ra1, IL13Ra2, IL15, IL17, R17Rb, IL18, IL22, IL23, IL25, IL7, IL33, IL35, ITGB4, ITK, KIR, LAG3, LAMP1, leptin, LPFS2, MHC class II, MUC-1, MUC-16, NCR3LG1, NKG2D, NKp46, NTPDase-1, OX40, OX40L, PD-1, PD-L1, PD-L2, PROM1, S152, SIRPalpha, SISP1, SLC, SPG64, ST2, STEAP1, STEAP2, Syk kinase, STEAP1, TROP2, TACI, TDO, T14, TIGIT, TIM3, TLR, TLR2, TLR4, TLR5, TLR9, TMEF1, TNFa, TNFRSF7, Tp55, TREM1, TSLP, TSLPR, TWEAK, VEGF, VISTA, Vstm3, WUCAM, DLL4, TGFbeta, GP100, GPRC5D, CD30 or CD16A; and VH3 is a third immunoglobulin heavy chain variable region that specifically binds to A2AR, APRIL, ATPDase, BAFF, BAFFR, BCMA, BlyS, BTK, BTLA, B7DC, B7B1, B7H2, B7H3, B7H4, B7H5, B7H6, B7H7, B7RP1, B7-4, C3, C5, CCL2, CCL3, CCL4, CCL5, CCL7, CCL8, CCL11, CCL15, CCL17, CCL19, CCL20, CCL21, CCL25 CCR3, CCR4, CD3, CD19, CD20, CD24, CD27, CD28, CD38, CD39, CD40, CD40L, CD47, CD52, CD70, CD80, CD86, CD123, CD133, CD137, CD137L, CD160, CD272, CEACAM5, CLEC9, CLEC91, CRTH2, CSF-1, CSF-2, CSF-3, CXCL1, CXCL2, CXCL4, CXCL12, CXCL13, CXCR3, cMet, CTLA4, DLL3, DNGR-1, E-cadherin, EGFR, ENTPD1, EpCAM, FCER1, FCER1A, FCER2, FGFR, FLAP, FOLH1, Gi24, GITR, GITRL, GPR5, HER2, HER3, ICOSL, ICOS, HHLA2, HMGB1, HVEM, IDO, IFNa, IgE, IGF1R, I2Rbeta, IL1, IL1A, 1iB, IL1110, IL2, IL4, IL4Ra, IL5, IL5R, IL6, IL7, IL7Ra, IL8, IL9, IL9R, IR10, rhIL10, IL12, IL13, IL13Ra1, IL13Ra2, IL15, IR17, IL17Rb, IL18, IL22, IL23, IL25, IL7, IL33, IL35, ITGB4, ITK, KIR, LAG3, LAMP1, leptin, LPFS2, MHC class II, MUC-1, MUC-16, NCR3LG1, NKG2D, NKp46, NTPDase-1, OX40, OX40L, PD-1, PD-L1, PD-L2, PROM1, S152, SIRPalpha, SISP1, SLC, SPG64, ST2, STEAP1, STEAP2, Syk kinase, STEAP1, TROP2, TACI, TDO, T14, TIGIT, TIM3, TLR, TLR2, TLR4, TLR5, TLR9, TMEF1, TNFa, TNFRSF7, Tp55, TREM1, TSLP, TSLPR, TWEAK, VEGF, VISTA, Vstm3, WUCAM, DLL4, TGFbeta, GP100, GPRC5D, CD30 or CD16A.

[0276] In another aspect, an antigen binding polypeptide complex of the invention comprises a polypeptide (e.g., a second or third polypeptide described herein) having a structure represented by VL3-L1-VH3-L2-CL-Fc, VH3-L1-VL3-L2-CL-Fc, VL3-L1-VH3-L2-CH1-Fc, or VH3-L1-VL3-L2-CH1-Fc, wherein L1 comprises the amino acid sequence of ggggsggsgsggggsasgsg (SEQ ID NO: 11), or a sequence having at least 50%, at least 60%, at least 70%, at least 80%, at least 90%, or at least 95% identity to SEQ ID NO: 11; L2 comprises the amino acid sequence of a or asggs (SEQ ID NO:4) or a sequence having at least 50%, at least 60%, at least 70%, at least 80%, at least 90%, or at least 95% identity to SEQ ID NO:4; VL3 is a third immunoglobulin light chain variable region that specifically binds to A2AR, APRIL, ATPDase, BAFF, BAFFR, BCMA, BlyS, BTK, BTLA, B7DC, B7H1, B7H2, B7H3, B7H4, B7H5, B7H6, B7H7, B7RP1, B7-4, C3, C5, CCL2, CCL3, CCL4, CCL5, CCL7, CCL8, CCL11, CCL15, CCL17, CCL19, CCL20, CCL21, CCL25 CCR3, CCR4, CD3, CD19, CD20, CD24, CD27, CD28, CD38, CD39, CD40, CD40L, CD47, CD52, CD70, CD80, CD86, CD123, CD133, CD137, CD137L, CD160, CD272, CEACAM5, CLEC9, CLEC91, CRTH2, CSF-1, CSF-2, CSF-3, CXCL1, CXCL2, CXCL4, CXCL12, CXCL13, CXCR3, cMet, CTLA4, DLL3, DNGR-1, E-cadherin, EGFR, ENTPD1, EpCAM, FCER1, FCER1A, FCER2, FGFR, FLAP, FOLH1, Gi24, GITR, GITRL, GPR5, HER2, HER3, ICOSL, ICOS, HHLA2, HMGB1, HVEM, IDO, IFNa, IgE, IGF1R, IL2Rbeta, IL1, IL1A, IL1B, IL1F10, IL2, IL4, IL4Ra, IL5, IL5R, IL6, IL7, IL7Ra, IL8, IL9, IL9R, 110, rhIL10, IL12, IL13, IL13Ra1, IL13Ra2, IL15, 117, IL17Rb, IL18, IL22, IL23, IL25, IL7, IL33, IL35, ITGB4, ITK, KIR, LAG3, LAMP1, leptin, LPFS2, MHC class II, MUC-1, MUC-16, NCR3LG1, NKG2D, NKp46, NTPDase-1, OX40, OX40L, PD-1, PD-L1, PD-L2, PROM1, S152, SIRPalpha, SISP1, SLC, SPG64, ST2, STEAP1, STEAP2, Syk kinase, STEAP1, TROP2, TACI, TDO, T14, TIGIT, TIM3, TLR, TLR2, TLR4, TLR5, TLR9, TMEF1, TNFa, TNFRSF7, Tp55, TREM1, TSLP, TSLPR, TWEAK, VEGF, VISTA, Vstm3, WUCAM, DLL4, TGFbeta, GP100, GPRC5D, CD30 or CD16A; and VH3 is a third immunoglobulin heavy chain variable region that specifically binds to A2AR, APRIL, ATPDase, BAFF, BAFFR, BCMA, BlyS, BTK, BTLA, B7DC, B7H1, B7H2, B7H3, B7H4, B7H5, B7H6, B7H7, B7RP1, B7-4, C3, C5, CCL2, CCL3, CCL4, CCLS, CCL7, CCL8, CCL11, CCL15, CCL17, CCL19, CCL20, CCL21, CCL25 CCR3, CCR4, CD3, CD19, CD20, CD24, CD27, CD28, CD38, CD39, CD40, CD40L, CD47, CD52, CD70, CD80, CD86, CD123, CD133, CD137, CD137L, CD160, CD272, CEACAM5, CLEC9, CLEC91, CRTH2, CSF-1, CSF-2, CSF-3, CXCL1, CXCL2, CXCL4, CXCL12, CXCL13, CXCR3, cMet, CTLA4, DLL3, DNGR-1, E-cadherin, EGFR, ENTPD1, EpCAM, FCER1, FCER1A, FCER2, FGFR, FLAP, FOLH1, Gi24, GITR, GITRL, GPR5, HER2, HER3, ICOSL, ICOS, HHLA2, HMGB1, HVEM, IDO, IFNa, IgE, IGF1R, IL2Rbeta, IL1, IL1A, IL1B, IL10, IL2, IL4, IL4Ra, IL5, IL5R, IL6, IL7, IL7Ra, IL8, IL9, IL9R, I110, rhIL10, IL12, IL13, IL13Ra1, IL13Ra2, IL15, IL17, IL17Rb, IL18, IL22, IL23, IL25, IL7, IL33, IL35, ITGB4, ITK, KIR, LAG3, LAMP1, leptin, LPFS2, MHC class II, MUC-1, MUC-16, NCR3LG1, NKG2D, NKp46, NTPDase-1, OX40, OX40L, PD-1, PD-L1, PD-L2, PROM1, S152, SIRPalpha, SISP1, SLC, SPG64, ST2, STEAP1, STEAP2, Syk kinase, STEAP1, TROP2, TACI, TDO, T14, TIGIT, TIM3, TLR, TLR2, TLR4, TLR5, TLR9, TMEF1, TNFa, TNFRSF7, Tp55, TREM1, TSLP, TSLPR, TWEAK, VEGF, VISTA, Vstm3, WUCAM, DLL4, TGFbeta, GP100, GPRC5D, CD30 or CD16A.

### Detectable Labels and Drug Conjugates

[0277] In some aspects, an antigen binding polypeptide or antigen binding polypeptide complex (e.g., an antibody or antigen binding fragment thereof) of the invention comprises one or more detectable labels. An antigen binding polypeptide or antigen binding polypeptide complex (e.g., an antibody or antigen binding fragment thereof) containing a detectable label is useful in therapeutic, diagnostic, imaging (e.g., radioimaging), or basic research applications.

[0278] In some aspects, the detectable label is a radioactive label. Examples of a radioactive label include, but are not limited to, the isotopes ³H, ¹⁴C, ³²P, ³⁵S, ³⁶Cl, ⁵¹Cr, ⁵⁷Co, ⁵⁸Co, ⁵⁹Fe, ⁹⁰Y, ¹²¹I, ¹²⁴I, ¹²⁵I, ¹³¹I, ¹¹¹In, ¹¹⁷Lu, ²¹¹At, ¹⁹⁸Au, ⁶⁷Cu, ²²Ac, ²¹³I, ⁹⁹Tc, ¹⁸⁶Re and ⁸⁹Zr.

[0279] In another aspect, the detectable label is a chemiluminescent label, fluorescent label, enzyme, biotin, or a combination thereof.

[0280] In another aspect, the detectable label is a peptide tag. In some aspects, the peptide tag is located at the N-terminus of the polypeptide or polypeptide complex. In another aspect, the peptide tag is located at the C-terminus of the polypeptide or polypeptide complex. In another aspect, the peptide tag is an affinity tag or fusion tag.

[0281] In another aspect, the detectable label is a polyhistidine tag, polyarginine tag, glutathione-S-transferase (GST), maltose binding protein (MBP), chitin binding protein (CBP), Strep-tag, thioredoxin (TRX), poly(NANP), FLAG tag, ALFA-tag, V5-tag, Myc-tag, hemagglutinin (HA) tag, Spot tag, T7 tag, NE tag, or green fluorescence protein (GFP), or a combination thereof. In some aspects, the polyhistidine tag consists of from about 4 to about 10 histidine residues. In some aspects, the polyhistidine tag consists of about 4, about 5, about 6, about 7, about 8, about 9, or about 10 histidine residues.

[0282] Additional examples of detectable labels and methods for introducing detectable labels into a polypeptide are known and include routine chemical, molecular biology and recombinant DNA techniques. See, e.g., Hnatowich et al., Science, 220(4597):613-615, 1983; Yao et al., Int. J. Mol. Sci., 17(2):194, 2016; Kimple et al., Curr. Protoc. Protein Sci., 73:Unit 9.9, 2013; Sambrook J, Fritsch E F. Molecular Cloning: A Laboratory Manual. Cold Spring Harbor Laboratory Press; Cold Spring Harbor, N.Y.: 1989; Molecular Cell Biology, 4^{th} edition, Section 3.5, Purifying, Detecting and Characterizing Proteins; and Mahmoodi et al., Cogent Biology, 5(1):DOI: 10/1080/23312025.2019.1665406.

[0283] In other aspects, an antigen binding polypeptide or antigen binding polypeptide complex (e.g., an antibody or antigen binding fragment thereof) of the invention is conjugated to an agent as an antibody-drug conjugate (ADC). An ADC of the invention is useful in therapeutic, diagnostic, imaging (e.g., radioimaging), or basic research applications.

[0284] In some aspects, an antigen binding polypeptide or antigen binding polypeptide complex (e.g., an antibody or antigen binding fragment thereof) of the invention is conjugated to a cytotoxic agent, immunomodulating agent, imaging agent, or therapeutic protein, typically via a linker. The linker can comprise a cleavable unit or can be non-cleavable. Cleavable units include, for example, disulfide containing linkers that are cleavable through disulfide exchange, acid-labile linkers that are cleavable at acidic pH, and linkers that are cleavable by hydrolases, esterases, peptidases, and glucoronidases (e.g., peptide linkers and glucoronide linkers). Non-cleavable linkers are believed to release drug via a proteolytic antibody degradation mechanism.

[0285] Methods for making an ADC are known and include, but are not limited to, conjugation via thiols, amides, aldehydes, or azides, as well as other routine chemical, molecular biology and recombinant DNA techniques. See, e.g., Yao et al., Int. J. Mol. Sci., 17(2):194, 2016; Sambrook J, Fritsch EF. Molecular Cloning: A Laboratory Manual. Cold Spring Harbor Laboratory Press; Cold Spring Harbor, N.Y.: 1989; Molecular Cell Biology, 4^{th} edition, Section 3.5, Purifying, Detecting and Characterizing Proteins; and Mahmoodi et al., Cogent Biology, 5(1):DOI: 10/1080/23312025.2019.1665406.

### Modifications

[0286] In another aspect, the invention is directed to an antigen binding polypeptide or antigen binding polypeptide complex (e.g., an antibody or antigen binding fragment thereof) comprising an effector function mutation or half-life extension mutation.

[0287] Effector functions are an important part of the humoral immune response and form an link between innate and adaptive immunity. Most effector functions are induced via the Fc region of an antibody, which can interact with complement proteins and specialized Fc receptors. As used herein, an “effector function mutation” refers to a change in the amino acid sequence, typically in the Fc region, which increases or decreases effector function, for example, increasing binding affinity of Fc for specific Fc receptors, or increasing antibody-dependent cellular cytotoxicity (ADCC) activity.

[0288] “Half-life” of a pharmaceutically active substance is the time it takes for the amount of the substance, once administered to the body, to reduce by half. A “half-life extension mutation” of an antigen binding polypeptide or antigen binding polypeptide complex of the invention refers to a change in the amino acid sequence, typically in the Fc region, which increases the half-life of the antigen binding polypeptide or antigen binding polypeptide complex (e.g., by increasing Fc receptor binding affinity, slowing off-rate for Fc and Fc receptors, and/or increased sialylation).

[0289] Examples of effector function mutations that increase function include, but are not limited to, the following substitutions in the Fc region, based on the EU numbering scheme: S298A/E333A/K334A, S239D/I332E, S239D/A330L/I332E, and G236A/S239D/I332E. Examples of effector function mutations that decrease function include, but are not limited to, the following substitutions in the Fc region, based on the EU numbering scheme: N297A and L234A/L235A. Additional examples of effector function mutations, half-life extension mutations and methods for incorporating the same into an amino acid sequence are known and described, for example, in Saunders, “Conceptual Approaches to Modulating Antibody Effector Functions and Circulation Half-Life,” Front. Immunol. Jun. 7, 2019.

[0290] In another aspect, the invention is directed to an antigen binding polypeptide or antigen binding polypeptide complex (e.g., an antibody or antigen binding fragment thereof) comprising one or more knob-into-hole modifications.

[0291] The term “knob-into-hole modification” as used herein, refers to a genetic modification that directs the pairing of two polypeptides to promote heterodimerization. In some aspects, the modification introduces a protuberance (knob) into one polypeptide and a cavity (hole) into the other polypeptide at an interface in which the two polypeptides interact. In another aspect, a knob-into-hole modification can be created by introducing only a hole modification, for example, by replacing an amino acid residue with a smaller side chain than the original amino acid residue (e.g., a substitution of one or more serine, threonine, valine or alanine residues, or a combination thereof). In yet another aspect, a knob-into-hole modification can be created by introducing only a knob modification, for example, by replacing an amino acid residue with a larger side chain than the original amino acid residue (e.g., a substitution of one or more tryptophan or tyrosine residues, or a combination thereof).

[0292] In some aspects, the knob-into-hole modification is in the binding interface of two Fc regions, the binding interface of two CH2 regions, the binding interface of two CH3 regions, the binding interface of a CL region and a CH1 region, or the binding interface of a VH region and a VL region. See, e.g., U.S. Pub. No. 2007/0178552, Int'l Pub. No. WO 96/027011, Int'l Pub. No. WO 98/050431 and Zhu et al., Protein Science 6:781-788, 1987.

[0293] In some aspects, the antigen binding polypeptide or antigen binding polypeptide complex comprises one, two, three, four, five, six, seven, eight, nine, ten, or more knob-into-hole modifications.

[0294] Knob-into-hole modifications are well known and can be incorporated into the antigen binding polypeptides and antigen binding polypeptide complexes of the invention using routine molecular biology and recombinant DNA techniques. See, e.g., U.S. Pub. No. 2003/0078385; Int'l Pub. No. WO 96/027011; Ridgway et al., Protein Eng., 9:617-621, 1996; and Merchant et al., Nat. Biotechnol., 16:677-681, 1998.

[0295] In some aspects, the knob-into-hole modification is an amino acid substitution. As used herein, such a substitution is described based on the EU numbering scheme of Kabat, which corresponds to the numbering in the Protein Data Bank (PDB).

[0296] In some aspects, the knob-into-hole modification is a knob substitution of S354C and/or T366W, based on the EU numbering scheme.

[0297] In some aspects, the knob-into-hole modification is a hole substitution of Y349C, T366S, L368A, Y407V, L234A, L235A, P239A, M428L, N433S, M252Y, S254T, T256E, or any combination thereof, based on the EU numbering scheme.

[0298] In another aspect, the knob-into-hole modifications are hole substitutions of Y349C, T366S, L368A and Y407V, based on the EU numbering scheme. In some aspects, the knob-into-hole modifications are a hole substitutions of L234A, L235A and P239A, based on the EU numbering scheme. In some aspects, the knob-into-hole modifications are hole substitutions of L234A and L235A, based on the EU numbering scheme. In some aspects, the knob-into-hole modifications are hole substitutions of M428L and N433S, based on the EU numbering scheme. In some aspects, the knob-into-hole modifications are hole substitutions of M252Y, S254T and T256E, based on the EU numbering scheme.

[0299] In another aspect, an antigen binding polypeptide complex is an IgG1 or IgG4 antibody and the knob-into-hole modifications are knob substitutions of S354C and T366W and hole substitutions of Y349C, T366S, L368A and Y407V.

[0300] In some aspects, the antigen binding polypeptide complex is an IgG1 or IgG4 antibody and the knob-into-hole modifications are hole substitutions of L234A, L235A and P239A.

[0301] In some aspects, the antigen binding polypeptide complex is an IgG1 or IgG4 antibody and the knob-into-hole modifications are hole substitutions of L234A and L235A.

[0302] In some aspects, the antigen binding polypeptide complex is an IgG1 or IgG4 antibody and the knob-into-hole modifications are hole substitutions of M428L and N433S.

[0303] In some aspects, the antigen binding polypeptide complex is an IgG1 or IgG4 antibody and the knob-into-hole modifications are hole substitutions of M252Y, S254T and T256E.

### Chimeric Antigen Receptors

[0304] In some aspects of the invention, the antigen binding polypeptides and antigen binding polypeptide complexes can be used in chimeric antigen receptor (CAR) therapy. In some aspects, the invention is directed to a CAR comprised of an antigen binding polypeptide or antigen binding polypeptide complex of the invention. In some aspects, a CAR of the invention comprises an antigen binding polypeptide or antigen binding polypeptide complex of the invention and a transmembrane region. In another aspect, a CAR of the invention comprises an antigen binding polypeptide or antigen binding polypeptide complex of the invention, a transmembrane region, and an intracellular region. In another aspect, the intracellular region is comprised of a costimulatory region and/or an intracellular signal transduction region. In another aspect, the intracellular region is a T cell activation domain. In yet another aspect, the antigen binding polypeptide or antigen binding polypeptide complex of the invention is joined to the transmembrane region by an immunoglobulin hinge.

### Polypeptides, Polynucleotides, Vectors, Cells, and Protein Production Methods

[0305] In some aspects, the invention is directed to a polypeptide encoding an antigen binding polypeptide or antigen binding polypeptide complex (e.g., an antibody or antigen binding fragment thereof) described herein.

[0306] In other aspects, the invention is directed to a polypeptide comprising an amino acid sequence of one or more of SEQ ID NOs:32-41, 58-66, 78-92, 673, 675, 677, 679, 681, 683, 685, 687, 689, 691, 693 and 695, or an amino acid sequence having at least 90% identity or at least 95% identity to one or more of SEQ ID NOs:32-41, 58-66, 78-92, 673, 675, 677, 679, 681, 683, 685, 687, 689, 691, 693 and 695. In other aspects, the invention is directed to a polypeptide comprising an amino acid sequence having at least 90% identity, at least 95% identity, or 100% identity to the amino acid sequence of SEQ ID NOs:32 or 33 that does not contain the eight histidine residues at the C-terminus. For example, the polypeptide may comprise an amino acid sequence having at least 90% (such as at least 91%, 92%, 93%, 94%, 95%, 96%, 97%, 98%, or 99%) identity to one or more of SEQ ID NOs: 32-41, 58-66, 78-92, 673, 675, 677, 679, 681, 683, 685, 687, 689, 691, 693 and 695. For example, the polypeptide may comprise the amino acid sequence of one or more of SEQ ID NOs: 32-41, 58-66, 78-92, 673, 675, 677, 679, 681, 683, 685, 687, 689, 691, 693 and 695.

[0307] In other aspects, the invention is directed to a polypeptide comprising an amino acid sequence encoded by one or more of SEQ ID NOs:42-51, 67-75, 93-107, 674, 676, 678, 680, 682, 684, 686, 688, 690, 692, 694 and 696, or encoded by a polynucleotide having at least 90% identity or at least 95% identity to one or more of SEQ ID NOs:42-51, 67-75, 93-107, 674, 676, 678, 680, 682, 684, 686, 688, 690, 692, 694 and 696. For example, the polypeptide may comprise an amino acid sequence encoded by a polynucleotide having at least 90% (such as at least 91%, 92%, 93%, 94%, 95%, 96%, 97%, 98%, or 99%) identity to one or more of SEQ ID NOs: 42-51, 67-75, 93-107, 674, 676, 678, 680, 682, 684, 686, 688, 690, 692, 694 and 696. For example, the polypeptide may comprise an amino acid sequence encoded by the polynucleotide shown in one or more of SEQ ID NOs: 42-51, 67-75, 93-107, 674, 676, 678, 680, 682, 684, 686, 688, 690, 692, 694 and 696.

[0308] In other aspects, the invention is directed to a polypeptide comprising an amino acid sequence of one or more of SEQ ID NOs:188-199, 359 and 361, or an amino acid sequence having at least 90% identity or at least 95% identity to one or more of SEQ ID NOs:188-199, 359 and 361. For example, the polypeptide may comprise an amino acid sequence having at least 90% (such as at least 91%, 92%, 93%, 94%, 95%, 96%, 97%, 98%, or 99%) identity to one or more of SEQ ID NOs: 188-199, 359 and 361. For example, the polypeptide may comprise the amino acid sequence of one or more of SEQ ID NOs: 188-199, 359 and 361.

[0309] In other aspects, the invention is directed to a polypeptide comprising an amino acid sequence encoded by one or more of SEQ ID NOs:360 and 362-374, or encoded by a polynucleotide having at least 90% identity or at least 95% identity to one or more of SEQ ID NOs:360 and 362-374. For example, the polypeptide may comprise an amino acid sequence encoded by a polynucleotide having at least 90% (such as at least 91%, 92%, 93%, 94%, 95%, 96%, 97%, 98%, or 99%) identity to one or more of SEQ ID NOs: 360 and 362-374. For example, the polypeptide may comprise an amino acid sequence encoded by the polynucleotide shown in one or more of SEQ ID NOs: 360 and 362-374.

[0310] In some aspects, the invention is directed to a polynucleotide encoding an antigen binding polypeptide or antigen binding polypeptide complex (e.g., an antibody or antigen binding fragment thereof) described herein. In other aspects, the invention is directed to a polynucleotide encoding a CAR described herein. As used herein, a “polynucleotide” includes DNA and RNA (e.g., mRNA).

[0311] In other aspects, the invention is directed to a polynucleotide comprising a polynucleotide sequence of one or more of SEQ ID NOs:42-51, 67-75, 93-107, 674, 676, 678, 680, 682, 684, 686, 688, 690, 692, 694 and 696, or a polynucleotide having at least 90% identity or at least 95% identity to one or more of SEQ ID NOs:42-51, 67-75, 93-107, 674, 676, 678, 680, 682, 684, 686, 688, 690, 692, 694 and 696. For example, the polynucleotide may have at least 90% (such as at least 91%, 92%, 93%, 94%, 95%, 96%, 97%, 98%, or 99%) identity to one or more of SEQ ID NOs: 42-51, 67-75, 93-107, 674, 676, 678, 680, 682, 684, 686, 688, 690, 692, 694 and 696. For example, the polynucleotide may have the polynucleotide sequence shown in one or more of SEQ ID NOs: 42-51, 67-75, 93-107, 674, 676, 678, 680, 682, 684, 686, 688, 690, 692, 694 and 696.

[0312] In other aspects, the invention is directed to a polynucleotide encoding a polypeptide of one or more of SEQ ID NOs:32-41, 58-66, 78-92, 673, 675, 677, 679, 681, 683, 685, 687, 689, 691, 693 and 695, or a polypeptide having at least 90% identity or at least 95% identity to one or more of SEQ ID NOs:32-41, 58-66, 78-92, 673, 675, 677, 679, 681, 683, 685, 687, 689, 691, 693 and 695. In other aspects, the invention is directed to a polynucleotide encoding an amino acid sequence having at least 90% identity, at least 95% identity, or 100% identity to SEQ ID NOs:32 or 33 that does not contain the eight histidine residues at the C-terminus. For example, the polynucleotide may encode a polypeptide having at least 90% (such as at least 91%, 92%, 93%, 94%, 95%, 96%, 97%, 98%, or 99%) identity to one or more of SEQ ID NOs: 32-41, 58-66, 78-92, 673, 675, 677, 679, 681, 683, 685, 687, 689, 691, 693 and 695. For example, the polynucleotide may encode a polypeptide as shown in one or more of SEQ ID NOs: 32-41, 58-66, 78-92, 673, 675, 677, 679, 681, 683, 685, 687, 689, 691, 693 and 695.

[0313] In other aspects, the invention is directed to a polynucleotide having a sequence of one or more of SEQ ID NOs:360 and 362-374, or a polynucleotide having at least 90% identity or at least 95% identity to one or more of SEQ ID NOs: 360 and 362-374. For example, the polynucleotide may have at least 90% (such as at least 91%, 92%, 93%, 94%, 95%, 96%, 97%, 98%, or 99%) identity to one or more of SEQ ID NOs: 360 and 362-374. For example, the polynucleotide may have the polynucleotide sequence shown in one or more of SEQ ID NOs: 360 and 362-374.

[0314] In other aspects, the invention is directed to a polynucleotide encoding a polypeptide of one or more of SEQ ID NOs:188-199, 359 and 361, or a polynucleotide encoding a polypeptide having at least 90% identity or at least 95% identity to one or more of SEQ ID NOs:188-199, 359 and 361. For example, the polynucleotide may have at least 90% (such as at least 91%, 92%, 93%, 94%, 95%, 96%, 97%, 98%, or 99%) identity to one or more of SEQ ID NOs: 188-199, 359 and 361. For example, the polynucleotide may have the polynucleotide sequence shown in one or more of SEQ ID NOs: 188-199, 359 and 361.

[0315] In other aspects, the invention is directed to a vector comprising a polynucleotide described herein.

[0316] In yet other aspects, the invention is directed to a host cell comprising a polynucleotide or vector described herein.

[0317] As used herein, the term “host cell” can be any type of cell, e.g., a primary cell, a cell in culture, or a cell from a cell line. In some aspects, the term “host cell” refers to a cell containing a foreign gene [e.g., a cell subjected to gene delivery or transfected with a polynucleotide (e.g., DNA or mRNA) encoding the gene] and the progeny or potential progeny of such a cell. Progeny of such a cell may not be identical to the parent cell transfected with the nucleic acid molecule, e.g., due to mutations or environmental influences that may occur in succeeding generations or integration of the nucleic acid molecule into the host cell genome.

[0318] In other aspects, the invention is directed to an immune cell expressing a CAR of the invention or a polynucleotide or vector encoding a CAR of the invention. In some aspects, the immune cell is a neutrophil, eosinophil, basophil, mast cell, monocyte, macrophage, dendritic cell, natural killer cell, or lymphocyte (B cell or T cell).

[0319] Methods which are well known to those skilled in the art can be used to construct vectors encoding antigen binding polypeptides and antigen binding polypeptide complexes (e.g., CDR, VH, VL, heavy chain and/or light chain coding sequences and appropriate transcriptional and translational control signals). These methods include, for example, in vitro recombinant DNA techniques, synthetic techniques, and in vivo genetic recombination.

[0320] A vector can be transferred to a host cell by conventional techniques and the resulting cells can then be cultured by conventional techniques to produce an antigen binding polypeptide or antigen binding polypeptide complex comprising, e.g., six CDRs, VH, VL, VH and VL, heavy chain, light chain, or heavy and light chain, or a domain thereof (e.g., one or more CDRs, VH, VL, VH and VL, heavy chain, or light chain). Thus, provided herein are host cells containing a polynucleotide encoding an antigen binding polypeptide or antigen binding polypeptide complex comprising, e.g., comprising six CDRs, VH, VL, VH and VL, heavy chain, light chain, or heavy and light chain, or a domain thereof (e.g., one or more CDRs, VH, VL, VH and VL, heavy chain, or light chain), operably linked to a promoter for expression of such sequences in the host cell. In some aspects, vectors encoding both heavy and light chains, or a domain thereof, individually, can be co-expressed in the host cell for expression. In some aspects, a host cell contains a vector comprising a polynucleotide encoding both a heavy chain and light chain, or a domain thereof. In some aspects, a host cell contains two different vectors, a first vector comprising a polynucleotide encoding a heavy chain or a domain thereof, and a second vector comprising a polynucleotide encoding a light chain or a domain thereof. In some aspects, a first host cell comprises a first vector comprising a polynucleotide encoding a heavy chain or a domain thereof, and a second host cell comprises a second vector comprising a polynucleotide encoding a light chain or a domain thereof. In some aspects, provided herein is a population of host cells comprising such a first host cell and such a second host cell.

[0321] In some aspects, provided herein is a population of vectors comprising a first vector comprising a polynucleotide encoding a light chain or domain thereof, and a second vector comprising a polynucleotide encoding a heavy chain or domain thereof. Alternatively, a single vector can be used which encodes, and is capable of expressing, both heavy and light chain polypeptides or a domain thereof.

[0322] A variety of host-vector systems can be utilized to express the polypeptides and polypeptide complexes described herein. Such host-vector systems represent vehicles by which the coding sequences of interest can be produced and subsequently purified, but also represent cells which can, when transformed or transfected with the appropriate nucleotide coding sequences, express a polypeptide or polypeptide complex described herein in situ. These include but are not limited to microorganisms such as bacteria (e.g., E. coli and B. subtilis) transformed with recombinant bacteriophage DNA, plasmid DNA or cosmid DNA expression vectors containing antibody coding sequences; yeast (e.g., Saccharomyces pichia) transformed with recombinant yeast expression vectors containing antibody coding sequences; insect cell systems infected with recombinant virus expression vectors (e.g., baculovirus) containing antibody coding sequences; plant cell systems (e.g., green algae such as Chlamydomonas reinhardtii) infected with recombinant virus expression vectors (e.g., cauliflower mosaic virus, CaMV; tobacco mosaic virus, TMV) or transformed with recombinant plasmid expression vectors (e.g., Ti plasmid) containing antibody coding sequences; or mammalian cell systems (e.g., COS (e.g., COS1 or COS), CHO, BHK, MDCK, HEK 293, NS0, PER.C6, VERO, CRL7030, HsS78Bst, HeLa, and NIH 3T3, HEK-293T, HepG2, SP210, IL1.1, B-W, L-M, BSC1, BSC40, YB/20, and BMT10 cells) harboring recombinant expression constructs containing promoters derived from the genome of mammalian cells (e.g., metallothionein promoter) or from mammalian viruses (e.g., the adenovirus late promoter; the vaccinia virus 7.5K promoter). In some aspects, cells for expressing polypeptide or polypeptide complexes described herein are CHO cells, for example CHO cells from the CHO GS System™ (Lonza). In some aspects, cells for expressing polypeptides or polypeptide complexes of the invention are human cells, e.g., human cell lines. In some aspects, a mammalian expression vector is pOptiVEC™ or pcDNA3.3. In some aspects, bacterial cells such as Escherichia coli, or eukaryotic cells (e.g., mammalian cells) are used for the expression of recombinant polypeptides. For example, mammalian cells such as Chinese hamster ovary (CHO) cells in conjunction with a vector such as the major intermediate early gene promoter element from human cytomegalovirus is an effective expression system for polypeptides (Foecking M K & Hofstetter H (1986) Gene 45: 101-105; and Cockett M I et al., (1990) Biotechnology 8: 662-667). In some aspects, polypeptides or polypeptide complexes described herein are produced by HEK-293T cells.

[0323] In addition, a host cell strain can be chosen which modulates the expression of the inserted sequences, or modifies and processes the gene product in the specific fashion desired. Such modifications (e.g., glycosylation) and processing (e.g., cleavage) of protein products can contribute to the function of the protein. To this end, eukaryotic host cells which possess the cellular machinery for proper processing of the primary transcript, glycosylation, and phosphorylation of the gene product can be used. Such mammalian host cells include but are not limited to CHO, VERO, BHK, Hela, MDCK, HEK 293, NIH 3T3, W138, BT483, Hs578T, HTB2, BT20 and T47D, NS0 (a murine myeloma cell line that does not endogenously produce any immunoglobulin chains), CRL7030, COS (e.g., COS1 or COS), PER.C6, VERO, HsS78Bst, HEK-293T, HepG2, SP210, IL1.1, B-W, L-M, BSC1, BSC40, YB/20, BMT10 and HsS78Bst cells.

[0324] Once a polypeptide or polypeptide complex described herein has been produced by recombinant expression, it can be purified by any method known in the art for purification of a protein or immunoglobulin molecule, for example, by chromatography (e.g., ion exchange, affinity, particularly by affinity for the specific antigen after Protein A, and size exclusion chromatography), centrifugation, differential solubility, or by any other standard technique for the purification of proteins. Further, the polypeptides or polypeptide complexes described herein can be fused to heterologous polypeptide sequences described herein (e.g., tags) or otherwise known in the art to facilitate purification.

[0325] In some aspects, a polypeptide or polypeptide complex described herein is isolated or purified. Generally, an isolated polypeptide or polypeptide complex is one that is substantially free of other polypeptides or polypeptide complexes with different antigenic specificities. For example, in some aspects, a preparation of a polypeptide or polypeptide complex described herein is substantially free of cellular material and/or chemical precursors.

### Pharmaceutical Compositions and Kits

[0326] In some aspects, the invention is directed to a pharmaceutical composition comprising an antigen binding polypeptide, antigen binding polypeptide complex (e.g., antibody or antigen binding fragment thereof), polypeptide, polynucleotide, vector, CAR or cell described herein.

[0327] In some aspects, the invention is directed to a pharmaceutical composition comprising (1) an antigen binding polypeptide, antigen binding polypeptide complex (e.g., antibody or antigen binding fragment thereof), polynucleotide, vector, CAR or cell described herein, and (2) a pharmaceutically acceptable carrier. The term “pharmaceutically acceptable carrier” includes any and all solvents, co-solvents, complexing agents, dispersion media, coatings, antibacterial and antifungal agents, isotonic and absorption delaying agents, and the like, which are not biologically or otherwise undesirable. The use of such media and agents for pharmaceutically active substances is known in the art. Except insofar as any conventional media or agent is incompatible with the active ingredient, its use in the therapeutic formulations is contemplated. Supplementary active ingredients can also be incorporated into the pharmaceutical compositions of the invention. In addition, various excipients, such as are commonly used in the art, can be included. These and other such compounds are described in the literature, e.g., in the Merck Index, Merck & Company, Rahway, N.J. Considerations for the inclusion of various components in pharmaceutical compositions are described, e.g., in Gilman et al. (Eds.) (2010); Goodman and Gilman's: The Pharmacological Basis of Therapeutics, 12th Ed., The McGraw-Hill Companies. In some aspects, the pharmaceutical composition is for parenteral, intravenous or subcutaneous administration.

[0328] In other aspects, the invention is directed to a kit comprising an antigen binding polypeptide, antigen binding polypeptide complex (e.g., antibody or antigen binding fragment thereof), polypeptide, polynucleotide, vector, CAR, cell, or pharmaceutical composition described herein, or a combination thereof. Once a pharmaceutical composition has been formulated, it can be stored in sterile vials as a solution, suspension, gel, emulsion, solid, crystal, or as a dehydrated or lyophilized powder. Such formulations may be stored either in a ready-to-use form or in a form (e.g., lyophilized) that is reconstituted prior to administration. In some aspects, the invention provides kits for producing a single-dose administration unit. In some aspects, the kits of the invention can contain both a first container having a dried protein and a second container having an aqueous formulation. In another aspect, kits containing single and multi-chambered pre-filled syringes (e.g., liquid syringes and lyosyringes) are also provided. In another aspect, the kit contains components for intravenous or subcutaneous administration.

### Methods of Use

[0329] In some aspects, the invention is directed to certain methods of use of an antigen binding polypeptide, antigen binding polypeptide complex (e.g., an antibody or antigen binding fragment thereof), polypeptide, polynucleotide, vector, CAR, cell, or pharmaceutical composition described herein, or a combination thereof. Any of the antigen binding polypeptide structures and any of the antigen binding polypeptide complex structures described herein targeting one or more of the targets described herein may be used in any of the methods and uses of the invention.

[0330] In some aspects, the antigen binding polypeptides or antigen binding polypeptide complexes (e.g., antibodies or antigen binding fragments thereof) specifically binds to three of A2AR, APRIL, ATPDase, BAFF, BAFFR, BCMA, BlyS, BTK, BTLA, B7DC, B7H1, B7H2, B7H3, B7H4, B7H5, B7H6, B7H7, B7RP1, B7-4, C3, C5, CCL2, CCL3, CCL4, CCL5, CCL7, CCL8, CCL11, CCL15, CCL17, CCL19, CCL20, CCL21, CCL25 CCR3, CCR4, CD3, CD19, CD20, CD24, CD27, CD28, CD38, CD39, CD40, CD40L, CD47, CD52, CD70, CD80, CD86, CD123, CD133, CD137, CD137L, CD160, CD272, CEACAM5, CLEC9, CLEC91, CRTH2, CSF-1, CSF-2, CSF-3, CXCL1, CXCL2, CXCL4, CXCL12, CXCL13, CXCR3, cMet, CTLA4, DLL3, DNGR-1, E-cadherin, EGFR, ENTPD1, EpCAM, FCER1, FCER1A, FCER2, FGFR, FLAP, FOLH1, Gi24, GITR, GITRL, GPR5, HER2, HER3, ICOSL, ICOS, HHLA2, HMGB1, HVEM, IDO, IFNa, IgE, IGF1R, IL2Rbeta, IL1, IL1A, IL1B, IL1F10, IL2, IL4, IL4Ra, IL5, IL5R, IL6, IL7, IL7Ra, IL8, IL9, IL9R, 110, rhIL10, IL12, IL13, IL13Ra1, IL13Ra2, IL15, IL17, IL17Rb, IL18, IL22, IL23, IL25, IL7, IL33, IL35, ITGB4, ITK, KIR, LAG3, LAMP1, leptin, LPFS2, MHC class II, MUC-1, MUC-16, NCR3LG1, NKG2D, NKp46, NTPDase-1, OX40, OX40L, PD-1, PD-L1, PD-L2, PROM1, S152, SIRPalpha, SISP1, SLC, SPG64, ST2, STEAP1, STEAP2, Syk kinase, STEAP1, TROP2, TACI, TDO, T14, TIGIT, TIM3, TLR, TLR2, TLR4, TLR5, TLR9, TMEF1, TNFa, TNFRSF7, Tp55, TREM1, TSLP, TSLPR, TWEAK, VEGF, VISTA, Vstm3, WUCAM, DLL4, TGFbeta, GP100, GPRC5D, CD30 and CD16A. As described herein, the VL1, VL2, VL3, VL4, VL5, VL6, VH1, VH2, VH3, VH4, VH5 and/or VH6 of the antigen binding polypeptide or polypeptide comprised within the antigen binding polypeptide complex may specifically bind to one or more of A2AR, APRIL, ATPDase, BAFF, BAFFR, BCMA, BlyS, BTK, BTLA, B7DC, B7H1, B7H2, B7H3, B7H4, B7H5, B7H6, B7H7, B7RP1, B7-4, C3, C5, CCL2, CCL3, CCL4, CCL5, CCL7, CCL8, CCL11, CCL15, CCL17, CCL19, CCL20, CCL21, CCL25 CCR3, CCR4, CD3, CD19, CD20, CD24, CD27, CD28, CD38, CD39, CD40, CD40L, CD47, CD52, CD70, CD80, CD86, CD123, CD133, CD137, CD137L, CD160, CD272, CEACAM5, CLEC9, CLEC91, CRTH2, CSF-1, CSF-2, CSF-3, CXCL1, CXCL2, CXCL4, CXCL12, CXCL13, CXCR3, cMet, CTLA4, DLL3, DNGR-1, E-cadherin, EGFR, ENTPD1, EpCAM, FCER1, FCER1A, FCER2, FGFR, FLAP, FOLH1, Gi24, GITR, GITRL, GPR5, HER2, HER3, ICOSL, ICOS, HHLA2, HMGB1, HVEM, IDO, IFNa, IgE, IGF1R, IL2Rbeta, IL1, IL1A, IL1B, IL1F10, IL2, IL4, IL4Ra, IL5, IL5R, IL6, IL7, IL7Ra, IL8, IL9, IL9R, IL10, rhIL10, IL12, IL13, IL13Ra1, IL13Ra2, IL15, IL17, IL17Rb, IL18, IL22, IL23, IL25, I1L7, 1L33, IL35, ITGB4, ITK, KIR, LAG3, LAMP1, leptin, LPFS2, MHC class II, MUC-1, MUC-16, NCR3LG1, NKG2D, NKp46, NTPDase-1, OX40, OX40L, PD-1, PD-L1, PD-L2, PROM1, S1S2, SIRPalpha, SISP1, SLC, SPG64, ST2, STEAP1, STEAP2, Syk kinase, STEAP1, TROP2, TACI, TDO, T14, TIGIT, TIM3, TLR, TLR2, TLR4, TLR5, TLR9, TMEF1, TNFa, TNFRSF7, Tp55, TREM1, TSLP, TSLPR, TWEAK, VEGF, VISTA, Vstm3, WUCAM, DLL4, TGFbeta, GP100, GPRC5D, CD30 or CD16A. For example, the antigen binding polypeptide or antigen binding polypeptide complex (e.g., antibodies or antigen binding fragments thereof) may specifically bind to CD3, CD28, CD38 and CD19. For example, the antigen binding polypeptide or antigen binding polypeptide complex (e.g., antibodies or antigen binding fragments thereof) may specifically bind to CD3, CD28, Trop2 and cMet. For example, the antigen binding polypeptide or antigen binding polypeptide complex (e.g., antibodies or antigen binding fragments thereof) may specifically bind to CD3, CD28, CD19 and CD20. Any of the antigen binding polypeptide structures and any of the antigen binding polypeptide complex structures described herein may be used to target one or more of the targets described herein in the methods and uses of the invention.

[0331] CD3 (Cluster of Differentiation 3) is a protein complex and T cell co-receptor that is involved in activating both the cytotoxic T cell (CD8+ naive T cells) and T helper cells (CD4+ naive T cells).

[0332] CD19 (Cluster of Differentiation 19, also known as B-Lymphocyte Surface Antigen B4, T Cell Surface Antigen Leu-12 and CVID3) is a transmembrane protein expressed in all B lineage cells. CD19 plays two major roles in human B cells: on the one hand, it acts as an adaptor protein to recruit cytoplasmic signaling proteins to the membrane; on the other, it works within the CD19/CD21 complex to decrease the threshold for B cell receptor signaling pathways. Due to its presence on all B cells, it is a biomarker for B lymphocyte development, lymphoma diagnosis and can be utilized as a target for leukemia immunotherapies.

[0333] CD28 (Cluster of Differentiation 28) is one of the proteins expressed on T cells that provide costimulatory signals required for T cell activation and survival. T cell stimulation through CD28 in addition to the T Cell Receptor (TCR) can provide a potent signal for the production of various interleukins (IL-6 in particular).

[0334] CD38 (Cluster of Differentiation 38, also known as cyclic ADP ribose hydrolase) is a glycoprotein found on the surface of many immune cells (white blood cells), including CD4+, CD8+, B lymphocytes and natural killer cells. CD38 also functions in cell adhesion, signal transduction and calcium signaling.

[0335] Her2 (Human Epidermal Growth Factor Receptor 2, also known as Her2/neu, Erb-B2, or CD340) is a member of the human epidermal growth factor receptor family. Amplification or overexpression of Her2 has been shown to play an important role in the development and progression of certain types of breast cancer.

[0336] cMet, also called membrane tyrosine-protein kinase Met or hepatocyte growth factor receptor (HGFR), is a protein that in humans is encoded by the MET gene. MET is a single pass tyrosine kinase receptor essential for embryonic development, organogenesis and wound healing. Abnormal MET activation in cancer correlates with poor prognosis, where aberrantly active MET triggers tumor growth, formation of new blood vessels (angiogenesis) that supply the tumor with nutrients, and cancer spread to other organs (metastasis).

[0337] Tumor-associated calcium signal transducer 2 is also known as Trop2 and epithelial glycoprotein-1 antigen (EGP-1). It is a protein that in humans is encoded by the TACSTD2 gene. Trop2 plays a role in tumor progression by actively interacting with several key molecular signaling pathways traditionally associated with cancer development and progression. Aberrant overexpression of Trop-2 has been described in several solid cancers, such as colorectal, renal, lung, and breast cancers. Trop-2 expression has also been described in some rare and aggressive malignancies, e.g., salivary duct, anaplastic thyroid, uterine/ovarian, and neuroendocrine prostate cancers.

[0338] B-lymphocyte antigen CD20 (CD20) is expressed on the surface of B cells beginning at the pro-B phase and progressively increasing in concentration until maturity. In humans CD20 is encoded by the MS4A1 gene. This gene encodes a member of the membrane-spanning 4A gene family. It is found on B cell lymphomas, hairy cell leukemia, B cell chronic lymphocytic leukemia, and melanoma cancer stem cells.

[0339] Receptor tyrosine-protein kinase erbB-3, also known as Her3 (human epidermal growth factor receptor 3), is a membrane bound protein that in humans is encoded by the ERBB3 gene. ErbB3 is a member of the epidermal growth factor receptor (EGFR/ERBB) family of receptor tyrosine kinases. ErbB3 as a heterodimerization partner, most critically with ErbB2, is implicated in growth, proliferation, chemotherapeutic resistance, and the promotion of invasion and metastasis. ErbB3 is associated with targeted therapeutic resistance in numerous cancers.

[0340] The adenosine A2A receptor, also known as A2AR or ADORA2A, is an adenosine receptor. This protein is a member of the G protein-coupled receptor (GPCR) family which possess seven transmembrane alpha helices, as well as an extracellular N-terminus and an intracellular C-terminus.

[0341] A proliferation-inducing ligand (APRIL), also known as tumor necrosis factor ligand superfamily member 13 (TNFSF13), is a protein of the TNF superfamily recognized by the cell surface receptor TAC. It is a member of the tumor necrosis factor ligand (TNF) ligand family. This protein is a ligand for TNFRSF17/BCMA, a member of the TNF receptor family. This protein and its receptor are both found to be important for B cell development.

[0342] The epidermal growth factor receptor (EGFR; ErbB-1; HER1 in humans) is a transmembrane protein that is a receptor for members of the epidermal growth factor family (EGF family) of extracellular protein ligands. The epidermal growth factor receptor is a member of the ErbB family of receptors, a subfamily of four closely related receptor tyrosine kinases: EGFR (ErbB-1), HER2/neu (ErbB-2), Her 3 (ErbB-3) and Her 4 (ErbB-4). In many cancer types, mutations affecting EGFR expression or activity could result in cancer.

[0343] Fibroblast growth factor receptor (FGFR) is a receptor that binds to members of the fibroblast growth factor (FGF) family of proteins. The FGF/FGFR signalling pathway is involved in a variety of cancers.

[0344] B-cell activating factor (BAFF), also known as tumor necrosis factor ligand superfamily member 13B, is a protein that in humans is encoded by the TNFSF13B gene. BAFF is also known as B Lymphocyte Stimulator (BLyS) and TNF- and APOL-related leukocyte expressed ligand (TALL-1) and the Dendritic cell-derived TNF-like molecule (CD257 antigen; cluster of differentiation 257). BAFF is a cytokine that belongs to the tumor necrosis factor (TNF) ligand family. This cytokine is a ligand for receptors TNFRSF13B/TACI, TNFRSF17/BCMA, and TNFRSF13C/BAFF-R. This cytokine is expressed in B cell lineage cells, and acts as a potent B cell activator. It has been also shown to play an important role in the proliferation and differentiation.

[0345] BAFF receptor (B-cell activating factor receptor, BAFF-R), also known as tumor necrosis factor receptor superfamily member 13C (TNFRSF13C) and BLyS receptor 3 (BR3), is a membrane protein of the TNF receptor superfamily which recognizes BAFF, an essential factor for B cell maturation and survival. In humans it is encoded by the TNFRSF13C gene. BAFF enhances B-cell survival in vitro and is a regulator of the peripheral B-cell population.

[0346] B-cell maturation antigen (BCMA or BCM), also known as tumor necrosis factor receptor superfamily member 17 (TNFRSF17), is a protein that in humans is encoded by the TNFRSF17 gene. TNFRSF17 is a cell surface receptor of the TNF receptor superfamily which recognizes BAFF. Serum B-cell maturation antigen (sBCMA) is the cleaved form of BCMA, found at low levels in the serum of normal patients and generally elevated in patients with multiple myeloma (MM).

[0347] Bruton's tyrosine kinase (BTK), also known as tyrosine-protein kinase BTK, is a tyrosine kinase that is encoded by the BTK gene in humans. BTK plays a crucial role in B cell development as it is required for transmitting signals from the pre-B cell receptor that forms after successful immunoglobulin heavy chain rearrangement. It also has a role in mast cell activation through the high-affinity IgE receptor.

[0348] B- and T-lymphocyte attenuator or BTLA (also known as cluster of differentiation 272 or CD272) is a protein that belongs to the CD28 immunoglobulin superfamily (IgSF) which is encoded by the BTLA gene. Its discovered ligand herpes virus entry mediator or HVEM (also known as tumour necrosis factor receptor superfamily member 14 or TNFRSF14) belongs to the tumor necrosis factor receptor superfamily (TNFRSF). In many cases BTLA expression is connected with unfavourable outcomes as it, for instance, inhibits the function of human CD8+ cancer-specific T cells.

[0349] Programmed cell death 1 ligand 2 (also known as PDL2 or B7DC) is a protein that in humans is encoded by the PDCD1LG2 gene. PDCD1LG2 has also been designated as CD273 (cluster of differentiation 273). PDCD1LG2 is an immune checkpoint receptor ligand which plays a role in negative regulation of the adaptive immune response. PD-L2 is one of two known ligands for Programmed cell death protein 1 (PD-1). PD-L2, PD-L1, and PD-1 expressions are important in the immune response to certain cancers.

[0350] Programmed death-ligand 1 (PD-L1) also known as cluster of differentiation 274 (CD274) or B7 homolog 1 (B7-Hi) is a protein that in humans is encoded by the CD274 gene. It is a 40 kDa type 1 transmembrane protein that has been speculated to play a major role in suppressing the adaptive arm of immune systems during particular events. The binding of PD-L1 to the inhibitory checkpoint molecule PD-1 transmits an inhibitory signal based on interaction with phosphatases (SHP-1 or SHP-2) via Immunoreceptor Tyrosine-Based Switch Motif (ITSM). This reduces the proliferation of antigen-specific T-cells in lymph nodes, while simultaneously reducing apoptosis in regulatory T cells (anti-inflammatory, suppressive T cells)—further mediated by a lower regulation of the gene Bcl-2. Upregulation of PD-L1 may allow cancers to evade the host immune system.

[0351] V-set domain-containing T-cell activation inhibitor 1 (also known as B7H4) is a protein that in humans is encoded by the VTCN1 gene. B7H4 belongs to the B7 family of costimulatory proteins. These proteins are expressed on the surface of antigen-presenting cells and interact with ligands (e.g., CD28; MIM 186760) on T lymphocytes. B7H4 is an immune checkpoint molecule.

[0352] Delta-like 3 (Drosophila), also known as DLL3, is a protein which in humans is encoded by the DLL3 gene.

[0353] Ectonucleoside triphosphate diphosphohydrolase-1 (gene: ENTPD1; protein: NTPDase1), also known as CD39 (Cluster of Differentiation 39), is a typical cell surface enzyme with a catalytic site on the extracellular face. NTPDase1 is an ectonucleotidase that catalyse the hydrolysis of γ- and β-phosphate residues of triphospho- and diphosphonucleosides to the monophosphonucleoside derivative. NTPDase1 hydrolyzes P2 receptor ligands, namely ATP, ADP, UTP and UDP with similar efficacy. NTPDase1 can therefore affect P2 receptor activation and functions.

[0354] Fc fragment of IgE, high affinity I, receptor for; alpha polypeptide, also known as FCER1A, is a protein which in humans is encoded by the FCER1A gene. The high affinity IgE receptor plays a central role in allergic disease, coupling allergen and mast cell to initiate the inflammatory and immediate hypersensitivity responses that are characteristic of disorders such as hay fever and asthma.

[0355] The high-affinity IgE receptor, also known as FCER1, or Fc epsilon RI, is the high-affinity receptor for the Fc region of immunoglobulin E, an antibody isotype involved in the allergy disorder and parasites immunity. FCER1 is a tetrameric receptor complex that binds Fc portion of the r heavy chain of IgE. It is constitutively expressed on mast cells and basophils and is inducible in eosinophils.

[0356] Arachidonate 5-lipoxygenase-activating protein also known as 5-lipoxygenase activating protein, or FLAP, is a protein that in humans is encoded by the ALOX5AP gene. FLAP is necessary for the activation of 5-lipoxygenase and therefore for the production of leukotrienes, 5-hydroxyeicosatetraenoic acid, 5-oxo-eicosatetraenoic acid, and specialized pro-resolving mediators of the lipoxin and resolvin classes. Leukotrienes, which need the FLAP protein to be made, have an established pathological role in allergic and respiratory diseases.

[0357] Glutamate carboxypeptidase II (GCPII), also known as N-acetyl-L1-aspartyl-L1-glutamate peptidase I (NAALADase I), NAAG peptidase, or prostate-specific membrane antigen (PSMA) is an enzyme that in humans is encoded by the FOLH1 (folate hydrolase 1) gene. Human GCPII contains 750 amino acids and weighs approximately 84 kDa. Human FOLH1 is highly expressed in the prostate, roughly a hundred times greater than in most other tissues. In some prostate cancers, PSMA is the second-most upregulated gene product, with an 8- to 12-fold increase over levels in noncancerous prostate cells. In vitro studies using prostate and breast cancer cell lines with decreased FOLH1 levels showed a significant decrease in the proliferation, migration, invasion, adhesion and survival of the cells.

[0358] Mucin 1, cell surface associated (MUC1), also called polymorphic epithelial mucin (PEM) or epithelial membrane antigen or EMA, is a mucin encoded by the MUC1 gene in humans. The ability of chemotherapeutic drugs to access the cancer cells is inhibited by the heavy glycosylation in the extracellular domain of MUC1.

[0359] CD133 antigen, also known as prominin-1, is a glycoprotein that in humans is encoded by the PROM1 gene. It is a member of pentaspan transmembrane glycoproteins, which specifically localize to cellular protrusions. CD133 is expressed in hematopoietic stem cells, endothelial progenitor cells, glioblastoma, neuronal and glial stem cells, various pediatric brain tumors, as well as adult kidney, mammary glands, trachea, salivary glands, uterus, placenta, digestive tract, testes, and some other cell types.

[0360] Mucin-16 (MUC-16), also known as Ovarian cancer-related tumor marker CA125, is a protein that in humans is encoded by the MUC16 gene. MUC-16 is a member of the mucin family glycoproteins. MUC-16 has found application as a tumor marker or biomarker that may be elevated in the blood of some patients with specific types of cancers, most notably ovarian cancer, or other conditions that are benign.

[0361] Lysosomal-associated membrane protein 1 (LAMP1) also known as lysosome-associated membrane glycoprotein 1 and CD107a (Cluster of Differentiation 107a), is a protein that in humans is encoded by the LAMP1 gene. LAMP1 is a type I transmembrane protein which is expressed at high or medium levels in many different normal tissue cell types. It resides primarily across lysosomal membranes, and functions to provide selectins with carbohydrate ligands. LAMP1 has also been shown to be a marker of degranulation on lymphocytes such as CD8+ and NK cells and may also play a role in tumor cell differentiation and metastasis.

[0362] Programmed death-ligand 1 (PD-L1), also known as cluster of differentiation 274 (CD274) or B7 homolog 1 (B7-H1), is a protein that in humans is encoded by the CD274 gene. Upregulation of PD-L1 may allow cancers to evade the host immune system.

[0363] Carcinoembryonic antigen-related cell adhesion molecule 1 (biliary glycoprotein) (CEACAM1), also known as CD66a (Cluster of Differentiation 66a), is a human glycoprotein, and a member of the carcinoembryonic antigen (CEA) gene family.

[0364] Metalloreductase STEAP1 is an enzyme that in humans is encoded by the STEAP1 gene. This gene is predominantly expressed in prostate tissue, and is found to be upregulated in multiple cancer cell lines. The gene product is predicted to be a six-transmembrane protein, and was shown to be a cell surface antigen significantly expressed at cell-cell junctions.

[0365] Epithelial cell adhesion molecule (EpCAM) is a transmembrane glycoprotein mediating calcium-independent homotypic cell-cell adhesion in epithelia. EpCAM is also involved in cell signaling, migration, proliferation, and differentiation. Additionally, EpCAM has oncogenic potential via its capacity to upregulate c-myc, e-fabp, and cyclins A & E. Since EpCAM is expressed exclusively in epithelia and epithelial-derived neoplasms, EpCAM can be used as diagnostic marker for various cancers.

[0366] In another aspect, the antigen binding polypeptides or antigen binding polypeptide complexes (e.g., antibodies or antigen binding fragments thereof) specifically bind a viral peptide, protein, polypeptide, or a fragment thereof. In some aspects, the viral peptide, protein, polypeptide, or a fragment thereof is selected from influenza virus neuraminidase, influenza virus hemagglutinin, human respiratory syncytial virus (RSV)-viral proteins, RSV F glycoprotein, RSV G glycoprotein, herpes simplex virus (HSV) viral proteins, herpes simplex virus glycoproteins gB, gC, gD, and gE, chlamydia MOMP and PorB antigens, core protein, matrix protein or other protein of Dengue virus, measles virus hemagglutinin, herpes simplex virus type 2 glycoprotein gB, poliovirus 1 VP1, envelope glycoproteins of HIV 1, hepatitis B surface antigen, diptheria toxin, streptococcus 24M epitope, gonococcal pilin, pseudorabies virus g50 (gpD), pseudorabies virus H (gpB), pseudorabies virus III (gpC), pseudorabies virus glycoprotein H, pseudorabies virus glycoprotein E, transmissible gastroenteritis glycoprotein 195, transmissible gastroenteritis matrix protein, swine rotavirus glycoprotein 38, swine parvovirus capsid protein, Serpulinahydodysenteriae protective antigen, bovine viral diarrhea glycoprotein 55, Newcastle disease virus hemagglutinin-neuraminidase, swine flu hemagglutinin, swine flu neuraminidase, foot and mouth disease virus, hog colera virus, swine influenza virus, African swine fever virus, Mycoplasma liyopneutiioniae, infectious bovine rhinotracheitis virus, infectious bovine rhinotracheitis virus glycoprotein E, glycoprotein G, infectious laryngotracheitis virus, infectious laryngotracheitis virus glycoprotein G or glycoprotein I, a glycoprotein of La Crosse virus, neonatal calf diarrhoea virus, Venezuelan equine encephalomyelitis virus, punta toro virus, murine leukemia virus, mouse mammary tumor virus, hepatitis B virus core protein and hepatitis B virus surface antigen or a fragment or derivative thereof, antigen of equine influenza virus or equine herpes virus, including equine influenza virus type A/Alaska 91 neuraminidase, equine influenza virus typeA/Miami 63 neuraminidase, equine influenza virus type A/Kentucky 81 neuraminidase equine herpes virus type 1 glycoprotein B, and equine herpes virus type 1 glycoprotein D, antigen of bovine respiratory syncytial virus or bovine parainfluenza virus, bovine respiratory syncytial virus attachment protein (BRSV G), bovine respiratory syncytial virus fusion protein (BRSV F), bovine respiratory syncytial virus nucleocapsid protein (BRSVN), bovine parainfluenza virus type 3 fusion protein, bovine parainfluenza virus type 3 hemagglutinin neuraminidase, bovine E viral diarrhoea virus glycoprotein 48 and glycoprotein 53, glycoprotein E of Dengue virus, and glycoprotein E1E2 of human hepatitis C virus. As described herein, the VL1, VL2, VL3, VL4, VL5, VL6, VH1, VH2, VH3, VH4, VH5 and/or VH6 of the antigen binding polypeptide or polypeptide comprised within the antigen binding polypeptide complex may specifically bind to one or more viral peptide, protein, polypeptide, or a fragment thereof such as an influenza virus neuraminidase, influenza virus hemagglutinin, human respiratory syncytial virus (RSV)-viral proteins, RSV F glycoprotein, RSV G glycoprotein, herpes simplex virus (HSV) viral proteins, herpes simplex virus glycoproteins gB, gC, gD, and gE, chlamydia MOMP and PorB antigens, core protein, matrix protein or other protein of Dengue virus, measles virus hemagglutinin, herpes simplex virus type 2 glycoprotein gB, poliovirus 1 VP1, envelope glycoproteins of HIV 1, hepatitis B surface antigen, diptheria toxin, streptococcus 24M epitope, gonococcal pilin, pseudorabies virus g50 (gpD), pseudorabies virus II (gpB), pseudorabies virus III (gpC), pseudorabies virus glycoprotein H, pseudorabies virus glycoprotein E, transmissible gastroenteritis glycoprotein 195, transmissible gastroenteritis matrix protein, swine rotavirus glycoprotein 38, swine parvovirus capsid protein, Serpulinahydodysenteriae protective antigen, bovine viral diarrhea glycoprotein 55, Newcastle disease virus hemagglutinin-neuraminidase, swine flu hemagglutinin, swine flu neuraminidase, foot and mouth disease virus, hog colera virus, swine influenza virus, African swine fever virus, Mycoplasma liyopneutiioniae, infectious bovine rhinotracheitis virus, infectious bovine rhinotracheitis virus glycoprotein E, glycoprotein G, infectious laryngotracheitis virus, infectious laryngotracheitis virus glycoprotein G or glycoprotein I, a glycoprotein of La Crosse virus, neonatal calf diarrhoea virus, Venezuelan equine encephalomyelitis virus, punta toro virus, murine leukemia virus, mouse mammary tumor virus, hepatitis B virus core protein and hepatitis B virus surface antigen or a fragment or derivative thereof, antigen of equine influenza virus or equine herpes virus, including equine influenza virus type A/Alaska 91 neuraminidase, equine influenza virus typeA/Miami 63 neuraminidase, equine influenza virus type A/Kentucky 81 neuraminidase equine herpes virus type 1 glycoprotein B, and equine herpes virus type 1 glycoprotein D, antigen of bovine respiratory syncytial virus or bovine parainfluenza virus, bovine respiratory syncytial virus attachment protein (BRSV G), bovine respiratory syncytial virus fusion protein (BRSV F), bovine respiratory syncytial virus nucleocapsid protein (BRSVN), bovine parainfluenza virus type 3 fusion protein, bovine parainfluenza virus type 3 hemagglutinin neuraminidase, bovine E viral diarrhoea virus glycoprotein 48 and glycoprotein 53, glycoprotein E of Dengue virus, glycoprotein E1E2 of human hepatitis C virus or a combination thereof. Any of the antigen binding polypeptide structures and any of the antigen binding polypeptide complex structures described herein may be used to target one or more of the viral targets described herein in the methods and uses of the invention.

[0367] Accordingly, In some aspects, the invention is directed to a method of modulating T cell activation, comprising administering to a subject in need thereof an antigen binding polypeptide, antigen binding polypeptide complex (e.g., antibody or antigen binding fragment thereof), polypeptide, polynucleotide, vector, CAR, cell or pharmaceutical composition described herein, or a combination thereof. In some aspects, the invention is directed to a method of modulating T cell activation, comprising administering to a subject in need thereof a therapeutically effective amount of an antigen binding polypeptide, antigen binding polypeptide complex (e.g., antibody or antigen binding fragment thereof), polypeptide, polynucleotide, vector, CAR, cell or pharmaceutical composition described herein, or a combination thereof.

[0368] In another aspect, the invention is directed to a method of modulating cell proliferation, comprising administering to a subject in need thereof an antigen binding polypeptide, antigen binding polypeptide complex (e.g., antibody or antigen binding fragment thereof), polypeptide, polynucleotide, vector, cell, CAR, or pharmaceutical composition described herein, or a combination thereof. In another aspect, the invention is directed to a method of modulating cell proliferation, comprising administering to a subject in need thereof a therapeutically effective amount of an antigen binding polypeptide, antigen binding polypeptide complex (e.g., antibody or antigen binding fragment thereof), polypeptide, polynucleotide, vector, cell, CAR, or pharmaceutical composition described herein, or a combination thereof.

[0369] As used herein, the term “modulating” means an increase or decrease in a given property. For example, “modulating T cell activation” means an increase or decrease in T cell activation and “modulating cell proliferation” means an increase or decrease in cell proliferation.

[0370] As used herein, the term “subject” means a human or a non-human mammal, e.g., a dog, a cat, a mouse, a rat, a cow, a sheep, a pig, a goat, a non-human primate or a bird, e.g., a chicken, as well as any other vertebrate or invertebrate. In some aspects, the subject is a human. In another aspect, the subject is a veterinary animal. In some aspects, the subject is a mammal.

[0371] As used herein, the terms “treat” or “treatment” refer to therapeutic or palliative measures. Beneficial or desired clinical results include, but are not limited to, alleviation, in whole or in part, of symptoms associated with a disease or disorder or condition, diminishment of the extent of disease, stabilized (i.e., not worsening) state of disease, delay or slowing of disease progression, amelioration or palliation of the disease state (e.g., one or more symptoms of the disease), and remission (whether partial or total), whether detectable or undetectable. “Treatment” can also mean prolonging survival as compared to expected survival if not receiving treatment.

[0372] As used herein, the terms “prevent” or “preventing” refer to the prevention of the onset, recurrence or spread, in whole or in part, of a disease or condition described herein, or a symptom thereof.

[0373] As used herein, a “therapeutically effective amount” is an amount of an antigen binding polypeptide or antigen binding polypeptide complex (e.g., an antibody or antigen binding fragment thereof) that is sufficient to achieve the desired effect and can vary according to the nature and severity of the disease condition, and the potency of the polypeptide or polypeptide complex. In some aspects, an antigen binding polypeptide or antigen binding polypeptide complex of the invention can be delivered by administering a polynucleotide, vector, CAR or cell that encodes the antigen binding polypeptide or antigen binding polypeptide complex. In another aspect, an antigen binding polypeptide or antigen binding polypeptide complex thereof can be delivered by administering a pharmaceutical composition containing the polypeptide or polypeptide complex. A therapeutic effect is the relief, to some extent, of one or more of the symptoms of the disease, and can include curing a disease. “Curing” means that the symptoms of active disease are eliminated. However, certain long-term or permanent effects of the disease can exist even after a cure is obtained.

[0374] T cell activation can be measured using scientific methods that are well known in the art. For example, T cell activation can be determined by detecting activation of T cells in response to a stimulus by measuring a characteristic response, such as cytokine secretion, or by analyzing cells by the specificity of their T cell receptor. Specific techniques include, but are not limited to, limiting dilutions culture, ELISPOT (enzyme-linked immunospot), intracellular staining, cytokine capture, tetramer staining, and spectratyping and biosensor assays.

[0375] Cell proliferation can be measured using scientific methods that are well known in the art. Such methods include, but are not limited to, metabolic activity assays (e.g., measuring absorbance of formazan dye), cell proliferation marker assays (e.g., Ki-68 antibody), ATP concentration assays (e.g., luciferase luminescence), and DNA synthesis assays (e.g., ³H-thymine or bromodeoxyuridine (BrdU)).

[0376] In another aspect, the invention is directed to a method of neutralizing viral infection, comprising administering to a subject in need thereof an antigen binding polypeptide, antigen binding polypeptide complex (e.g., antibody or antigen binding fragment thereof), polypeptide, polynucleotide, vector, CAR, cell or pharmaceutical composition described herein, or a combination thereof. In another aspect, the invention is directed to a method of neutralizing viral infection, comprising administering to a subject in need thereof a therapeutically effective amount of an antigen binding polypeptide, antigen binding polypeptide complex (e.g., antibody or antigen binding fragment thereof), polypeptide, polynucleotide, vector, CAR, cell or pharmaceutical composition described herein, or a combination thereof. In some aspects, the viral infection is not human immunodeficiency virus (HIV) and/or severe acute respiratory syndrome (SARS).

[0377] In some aspects, the invention is directed to a method of treating or preventing a disease or condition, comprising administering to a subject in need thereof an antigen binding polypeptide, antigen binding polypeptide complex (e.g., antibody or antigen binding fragment thereof), polypeptide, polynucleotide, vector, cell, CAR or pharmaceutical composition described herein, or a combination thereof. In some aspects, the invention is directed to a method of treating or preventing a disease or condition, comprising administering to a subject in need thereof a therapeutically effective amount of an antigen binding polypeptide, antigen binding polypeptide complex (e.g., antibody or antigen binding fragment thereof), polypeptide, polynucleotide, vector, cell, CAR or pharmaceutical composition described herein, or a combination thereof. The present invention further provides an antigen binding polypeptide, antigen binding polypeptide complex (e.g., antibody or antigen binding fragment thereof), polypeptide, polynucleotide, vector, cell, CAR or pharmaceutical composition described herein, or a combination thereof, for use in treating or preventing a disease or condition in a subject. The present invention further provides the use of an antigen binding polypeptide, antigen binding polypeptide complex (e.g., antibody or antigen binding fragment thereof), polypeptide, polynucleotide, vector, cell, CAR or pharmaceutical composition described herein, or a combination thereof in the manufacture of a medicament for the treatment or prevention of a disease or condition in a subject.

[0378] In another aspect, the invention is directed to a method of treating or preventing a virus infection, wherein the virus is influenza virus, respiratory syncytial virus (RSV), chlamydia, adenovirdiae, mastadeno virus, aviadenovirus, herpesviridae, herpes simplex virus 1, herpes simplex virus 2, herpes simplex virus 5, herpes simplex virus 6, leviviridae, levivirus, enterobacteria phase MS2, allolevirus, poxviridae, chordopoxvirinae, parapoxvirus, avipoxvirus, capripoxvirus, leporiipoxvirus, suipoxvirus, molluscipoxvirus, entomopoxvirinae, papovaviridae, polyomavirus, papillomavirus, paramyxoviridae, paramyxovirus, parainfluenza virus 1, mobillivirus, measles virus, rubulavirus, mumps virus, pneumonovirinae, pneumovirus, me tapneumo virus, avian pneumovirus, human metapneumovirus, picornaviridae, enterovirus, rhinovirus, hepatovirus, human hepatitis A virus, cardiovirus, andaptho virus, reoviridae, orthoreovirus, orbivirus, rotavirus, cypovirus, fijivirus, phytoreovirus, oryzavirus, retroviridae, mammalian type B retroviruses, mammalian type C retroviruses, avian type C retroviruses, type D retrovirus group, BLV-HTLV retroviruses, lentivirus, human immunodeficiency virus 1, human immunodeficiency virus 2, HTLV-I and -II viruses, SARS coronavirus, herpes simplex E virus, Epstein Barr virus, cytomegalovirus, hepatitis virus (HCV, HAV, HBV, HDV, HEV), Toxoplasma gondii virus, Treponema pallidium virus, human T-lymphotrophic virus, encephalitis virus, West Nile virus, Dengue virus, Varicella Zoster Virus, rubeola, mumps, rubella, spumavirus, flaviviridae, hepatitis C virus, hepadnaviridae, hepatitis B virus, togaviridae, alphavirus sindbis virus, rubivirus, rubella virus, rhabdoviridae, vesiculovirus, lyssavirus, ephemerovirus, cytorhabdo virus, necleorhabdo virus, arenaviridae, arenavirus, lymphocytic choriomeningitis virus, Ippy virus, lassa virus, coronaviridae, coronavirus or torovirus. The present invention further provides an antigen binding polypeptide, antigen binding polypeptide complex (e.g., antibody or antigen binding fragment thereof), polypeptide, polynucleotide, vector, cell, CAR or pharmaceutical composition described herein, or a combination thereof, for use in treating or preventing a virus infection in a subject. The present invention further provides the use of an antigen binding polypeptide, antigen binding polypeptide complex (e.g., antibody or antigen binding fragment thereof), polypeptide, polynucleotide, vector, cell, CAR or pharmaceutical composition described herein, or a combination thereof in the manufacture of a medicament for the treatment or prevention of a virus infection in a subject. The virus may be selected from: influenza virus, respiratory syncytial virus (RSV), chlamydia, adenovirdiae, mastadeno virus, aviadenovirus, herpesviridae, herpes simplex virus 1, herpes simplex virus 2, herpes simplex virus 5, herpes simplex virus 6, leviviridae, levivirus, enterobacteria phase MS2, allolevirus, poxviridae, chordopoxvirinae, parapoxvirus, avipoxvirus, capripoxvirus, leporiipoxvirus, suipoxvirus, molluscipoxvirus, entomopoxvirinae, papovaviridae, polyomavirus, papillomavirus, paramyxoviridae, paramyxovirus, parainfluenza virus 1, mobillivirus, measles virus, rubulavirus, mumps virus, pneumonovirinae, pneumovirus, me tapneumo virus, avian pneumovirus, human metapneumovirus, picornaviridae, enterovirus, rhinovirus, hepatovirus, human hepatitis A virus, cardiovirus, andaptho virus, reoviridae, orthoreovirus, orbivirus, rotavirus, cypovirus, fijivirus, phytoreovirus, oryzavirus, retroviridae, mammalian type B retroviruses, mammalian type C retroviruses, avian type C retroviruses, type D retrovirus group, BLV-HTLV retroviruses, lentivirus, human immunodeficiency virus 1, human immunodeficiency virus 2, HTLV-I and -II viruses, SARS coronavirus, herpes simplex E virus, Epstein Barr virus, cytomegalovirus, hepatitis virus (HCV, HAV, HBV, HDV, HEV), Toxoplasma gondii virus, Treponema pallidium virus, human T-lymphotrophic virus, encephalitis virus, West Nile virus, Dengue virus, Varicella Zoster Virus, rubeola, mumps, rubella, spumavirus, flaviviridae, hepatitis C virus, hepadnaviridae, hepatitis B virus, togaviridae, alphavirus sindbis virus, rubivirus, rubella virus, rhabdoviridae, vesiculovirus, lyssavirus, ephemerovirus, cytorhabdo virus, necleorhabdo virus, arenaviridae, arenavirus, lymphocytic choriomeningitis virus, Ippy virus, lassa virus, coronaviridae, coronavirus and torovirus.

[0379] In some aspects, the invention is directed to a method of neutralizing HIV infection, comprising administering to a subject in need thereof an antigen binding polypeptide, antigen binding polypeptide complex (e.g., antibody or antigen binding fragment thereof), polypeptide, polynucleotide, vector, CAR, cell or pharmaceutical composition described herein, or a combination thereof. In another aspect, the invention is directed to a method of neutralizing HIV infection, comprising administering to a subject in need thereof a therapeutically effective amount of an antigen binding polypeptide, antigen binding polypeptide complex (e.g., antibody or antigen binding fragment thereof), polypeptide, polynucleotide, vector, CAR, cell or pharmaceutical composition described herein, or a combination thereof. The present invention further provides an antigen binding polypeptide, antigen binding polypeptide complex (e.g., antibody or antigen binding fragment thereof), polypeptide, polynucleotide, vector, cell, CAR or pharmaceutical composition described herein, or a combination thereof, for use in treating or preventing a cancer in a subject. The present invention further provides the use of an antigen binding polypeptide, antigen binding polypeptide complex (e.g., antibody or antigen binding fragment thereof), polypeptide, polynucleotide, vector, cell, CAR or pharmaceutical composition described herein, or a combination thereof in the manufacture of a medicament for the treatment or prevention of a cancer in a subject. In some aspects, the invention is directed to a method of treating or preventing HIV infection, comprising administering to a subject in need thereof an antigen binding polypeptide, antigen binding polypeptide complex (e.g., antibody or antigen binding fragment thereof), polypeptide, polynucleotide, vector, CAR, cell or pharmaceutical composition described herein, or a combination thereof. In another aspect, the invention is directed to a method of treating or preventing HIV infection, comprising administering to a subject in need thereof a therapeutically effective amount of an antigen binding polypeptide, antigen binding polypeptide complex (e.g., antibody or antigen binding fragment thereof), polypeptide, polynucleotide, vector, CAR, cell or pharmaceutical composition described herein, or a combination thereof. The present invention further provides an antigen binding polypeptide, antigen binding polypeptide complex (e.g., antibody or antigen binding fragment thereof), polypeptide, polynucleotide, vector, cell, CAR or pharmaceutical composition described herein, or a combination thereof, for use in treating or preventing a cancer in a subject. The present invention further provides the use of an antigen binding polypeptide, antigen binding polypeptide complex (e.g., antibody or antigen binding fragment thereof, polypeptide, polynucleotide, vector, cell, CAR or pharmaceutical composition described herein, or a combination thereof in the manufacture of a medicament for the treatment or prevention of a cancer in a subject.

[0380] In some aspects, the invention is directed to a method of treating or preventing acquired immunodeficiency syndrome (AIDS), comprising administering to a subject in need thereof an antigen binding polypeptide, antigen binding polypeptide complex (e.g., antibody or antigen binding fragment thereof), polypeptide, polynucleotide, vector, CAR, cell or pharmaceutical composition described herein, or a combination thereof. In another aspect, the invention is directed to a method of treating or preventing AIDS, comprising administering to a subject in need thereof a therapeutically effective amount of an antigen binding polypeptide, antigen binding polypeptide complex (e.g., antibody or antigen binding fragment thereof), polypeptide, polynucleotide, vector, CAR, cell or pharmaceutical composition described herein, or a combination thereof. The present invention further provides an antigen binding polypeptide, antigen binding polypeptide complex (e.g., antibody or antigen binding fragment thereof), polypeptide, polynucleotide, vector, cell, CAR or pharmaceutical composition described herein, or a combination thereof, for use in treating or preventing AIDS in a subject. The present invention further provides the use of an antigen binding polypeptide, antigen binding polypeptide complex (e.g., antibody or antigen binding fragment thereof), polypeptide, polynucleotide, vector, cell, CAR or pharmaceutical composition described herein, or a combination thereof in the manufacture of a medicament for the treatment or prevention of AIDS in a subject.

[0381] AIDS-related complex (ARC) is prodromal phase of HIV infection that presents certain symptoms that include, but are not limited to, low grade fever, unexplained weight loss, diarrhea, HIV-related opportunistic infections and generalized lymphadenopathy. In some aspects, the invention is directed to a method of treating or preventing ARC, comprising administering to a subject in need thereof an antigen binding polypeptide, antigen binding polypeptide complex (e.g., antibody or antigen binding fragment thereof), polypeptide, polynucleotide, vector, CAR, cell or pharmaceutical composition described herein, or a combination thereof. In another aspect, the invention is directed to a method of treating or preventing ARC, comprising administering to a subject in need thereof a therapeutically effective amount of an antigen binding polypeptide, antigen binding polypeptide complex (e.g., antibody or antigen binding fragment thereof), polypeptide, polynucleotide, vector, CAR, cell or pharmaceutical composition described herein, or a combination thereof. The present invention further provides an antigen binding polypeptide, antigen binding polypeptide complex (e.g., antibody or antigen binding fragment thereof), polypeptide, polynucleotide, vector, cell, CAR or pharmaceutical composition described herein, or a combination thereof, for use in treating or preventing ARC in a subject. The present invention further provides the use of an antigen binding polypeptide, antigen binding polypeptide complex (e.g., antibody or antigen binding fragment thereof), polypeptide, polynucleotide, vector, cell, CAR or pharmaceutical composition described herein, or a combination thereof in the manufacture of a medicament for the treatment or prevention of ARC in a subject.

[0382] HIV-related opportunistic infections are illnesses that occur more frequently and/or more severely in subjects infected with HIV, due to their compromised immune systems. Examples of HIV-related opportunistic infections include, but are not limited to, candidiasis, invasive cervical cancer, coccidioidomycosis, cryptococcosis, cryptosporidiosis (Crypto), cystoisosporiasis, cytomegalovirus (CMV) infection, encephalopathy, herpes simplex virus (HSV) infection, histoplasmosis, Kaposi's sarcoma (KS), lymphoma, tuberculosis, Mycobacterium avium complex (MAC), Pneumocystis pneumonia (PCP), pneumonia, progressive multifocal leukoencephalopathy, Salmonella septicemia, toxoplasmosis, or wasting syndrome.

[0383] In some aspects, the invention is directed to a method of treating or preventing an HIV-related opportunistic infection, comprising administering to a subject in need thereof an antigen binding polypeptide, antigen binding polypeptide complex (e.g., antibody or antigen binding fragment thereof), polypeptide, polynucleotide, vector, CAR, cell or pharmaceutical composition described herein, or a combination thereof. In another aspect, the invention is directed to a method of treating or preventing an HIV-related opportunistic infection, comprising administering to a subject in need thereof a therapeutically effective amount of an antigen binding polypeptide, antigen binding polypeptide complex (e.g., antibody or antigen binding fragment thereof), polypeptide, polynucleotide, vector, CAR, cell or pharmaceutical composition described herein, or a combination thereof. The present invention further provides an antigen binding polypeptide, antigen binding polypeptide complex (e.g., antibody or antigen binding fragment thereof), polypeptide, polynucleotide, vector, cell, CAR or pharmaceutical composition described herein, or a combination thereof, for use in treating or preventing an HIV-related opportunistic infection in a subject. The present invention further provides the use of an antigen binding polypeptide, antigen binding polypeptide complex (e.g., antibody or antigen binding fragment thereof), polypeptide, polynucleotide, vector, cell, CAR or pharmaceutical composition described herein, or a combination thereof in the manufacture of a medicament for the treatment or prevention of an HIV-related opportunistic infection in a subject.

[0384] In some aspects of any of the methods disclosed herein, the HIV is HIV-1 or HIV-2.

[0385] Clauses relating to aspects of the invention:
[0386] 1. An antigen binding polypeptide complex comprising a first polypeptide and a second polypeptide;
   [0387] wherein the first polypeptide has a structure represented by:
   [0388] VL1-VL2-VH2-VH1;
   [0389] VH1-VH2-VL2-VL1;
   [0390] VL1-L1-VL2-L2-VH2-L3-VH1; or
   [0391] VH1-L1-VH2-L2-VL2-L3-VL1;
   [0392] wherein the second polypeptide has a structure represented by:
   [0393] VL3-VH3;
   [0394] VH3-VL3;
   [0395] VL3-L4-VH3; or
   [0396] VH3-L4-VL3;
   [0397] wherein:
   [0398] VL1 is a first immunoglobulin light chain variable region;
   [0399] VL2 is a second immunoglobulin light chain variable region;
   [0400] VL3 is a third immunoglobulin light chain variable region;
   [0401] VH1 is a first immunoglobulin heavy chain variable region;
   [0402] VH2 is a second immunoglobulin heavy chain variable region;
   [0403] VH3 is a third immunoglobulin heavy chain variable region; and
   [0404] L1, L2, L3 and L4 are amino acid linkers.
[0405] 2. The antigen binding polypeptide complex of clause 1, wherein the first polypeptide has a structure represented by:
   [0406] VL1-VL2-VH2-VH1-Fc;
   [0407] VH1-VH2-VL2-VL1-Fc;
   [0408] VL1-L1-VL2-L2-VH2-L3-VH1-Fc;
   [0409] VH1-L1-VH2-L2-VL2-L3-VL1-Fc;
   [0410] VL1-L1-VL2-L2-VH2-L3-VH1-L4-Fc; or
   [0411] VH1-L1-VH2-L2-VL2-L3-VL1-L4-Fc;
   [0412] wherein the second polypeptide has a structure represented by:
   [0413] VL3-VH3-Fc;
   [0414] VH3-VL3-Fc;
   [0415] VL3-L5-VH3-Fc;
   [0416] VH3-L5-VL3-Fc;
   [0417] VL3-L5-VH3-L6-Fc; or
   [0418] VH3-L5-VL3-L6-Fc;
   [0419] wherein:
   [0420] VL1 is a first immunoglobulin light chain variable region;
   [0421] VL2 is a second immunoglobulin light chain variable region;
   [0422] VL3 is a third immunoglobulin light chain variable region;
   [0423] VH1 is a first immunoglobulin heavy chain variable region;
   [0424] VH2 is a second immunoglobulin heavy chain variable region;
   [0425] VH3 is a third immunoglobulin heavy chain variable region;
   [0426] Fc is a region comprising an immunoglobulin heavy chain constant region 2 (CH2), an immunoglobulin heavy chain constant region 3 (CH3), and optionally, an immunoglobulin hinge; and L1, L2, L3, L4, L5, and L6 are amino acid linkers.
[0427] 3. The antigen binding polypeptide complex of clause 1, wherein the first polypeptide has a structure represented by:
   [0428] VL1-VL2-VH2-VH1-CH1;
   [0429] VH1-VH2-VL2-VL1-CH1;
   [0430] VL1-VL2-VH2-VH1-CL;
   [0431] VH1-VH2-VL2-VL1-CL;
   [0432] VL1-VL2-VH2-VH1-CH1-CL;
   [0433] VH1-VH2-VL2-VL1-CH1-CL;
   [0434] VL1-VL2-VH2-VH1-CL-CH1;
   [0435] VH1-VH2-VL2-VL1-CL-CH1;
   [0436] VL1-L1-VL2-L2-VH2-L3-VH1-L4-CH1;
   [0437] VH1-L1-VH2-L2-VL2-L3-VL1-L4-CH1;
   [0438] VL1-L1-VL2-L2-VH2-L3-VH1-L4-CL;
   [0439] VH1-L1-VH2-L2-VL2-L3-VL1-L4-CL;
   [0440] VL1-L1-VL2-L2-VH2-L3-VH1-L4-CH1-L5-CL;
   [0441] VH1-L1-VH2-L2-VL2-L3-VL1-L4-CH1-L5-CL;
   [0442] VL1-L1-VL2-L2-VH2-L3-VH1-L4-CL-L5-CH1; or
   [0443] VH1-L1-VH2-L2-VL2-L3-VL1-L4-CL-L5-CH1;
   [0444] wherein the second polypeptide has a structure represented by:
   [0445] VL3-VH3-CH1;
   [0446] VH3-VL3-CH1;
   [0447] VL3-VH3-CL;
   [0448] VH3-VL3-CL;
   [0449] VL3-VH3-CH1-CL;
   [0450] VH3-VL3-CH1-CL;
   [0451] VL3-VH3-CL-CH1;
   [0452] VH3-VL3-CL-CH1;
   [0453] VL3-CL-VH3-CH1;
   [0454] VL3-CH1-VH3-CL;
   [0455] VH3-CH1-VL3-CL;
   [0456] VH3-CL-VL3-CH1;
   [0457] VL3-L6-VH3-L7-CH1;
   [0458] VH3-L6-VL3-L7-CH1;
   [0459] VL3-L6-VH3-L7-CL;
   [0460] VH3-L6-VL3-L7-CL;
   [0461] VL3-L6-VH3-L7-CH1-L8-CL;
   [0462] VH3-L6-VL3-L7-CH1-L8-CL;
   [0463] VL3-L6-VH3-L7-CL-L8-CH1;
   [0464] VH3-L6-VL3-L7-CL-L8-CH1;
   [0465] VL3-L6-CL-L7-VH3-L8-CH1;
   [0466] VL3-L6-CH1-L7-VH3-L8-CL;
   [0467] VH3-L6-CH1-L7-VL3-L8-CL;
   [0468] VH3-L6-CL-L7-VL3-L8-CH1;
   [0469] VL3-VH3-L6-CH1-CL;
   [0470] VH3-VL3-L6-CH1-CL;
   [0471] VL3-VH3-L6-CL-CH1;
   [0472] VH3-VL3-L6-CL-CH1;
   [0473] VL3-CL-L6-VH3-CH1;
   [0474] VL3-CH1-L6-VH3-CL;
   [0475] VH3-CH1-L6-VL3-CL; or
   [0476] VH3-CL-L6-VL3-CH1;
   [0477] wherein:
   [0478] VL1 is a first immunoglobulin light chain variable region;
   [0479] VL2 is a second immunoglobulin light chain variable region;
   [0480] VL3 is a third immunoglobulin light chain variable region;
   [0481] VH1 is a first immunoglobulin heavy chain variable region;
   [0482] VH2 is a second immunoglobulin heavy chain variable region;
   [0483] VH3 is a third immunoglobulin heavy chain variable region;
   [0484] CH1 is an immunoglobulin heavy chain constant region 1;
   [0485] CL is an immunoglobulin light chain constant region; and
   [0486] L1, L2, L3, L4, L5, L6, L7 and L8 are amino acid linkers.
[0487] 4. The antigen binding polypeptide complex of clause 1, wherein the first polypeptide has a structure represented by:
   [0488] VL1-VL2-VH2-VH1-CH1-Fc;
   [0489] VH1-VH2-VL2-VL1-CH1-Fc;
   [0490] VL1-VL2-VH2-VH1-CL-Fc;
   [0491] VH1-VH2-VL2-VL1-CL-Fc;
   [0492] VL1-VL2-VH2-VH1-CH1-CL-Fc;
   [0493] VH1-VH2-VL2-VL1-CH1-CL-Fc;
   [0494] VL1-VL2-VH2-VH1-CL-CH1-Fc;
   [0495] VH1-VH2-VL2-VL1-CL-CH1-Fc;
   [0496] VL1-L1-VL2-L2-VH2-L3-VH1-L4-CH1-Fc;
   [0497] VH1-L1-VH2-L2-VL2-L3-VL1-L4-CH1-Fc;
   [0498] VL1-L1-VL2-L2-VH2-L3-VH1-L4-CL-Fc;
   [0499] VH1-L1-VH2-L2-VL2-L3-VL1-L4-CL-Fc;
   [0500] VL1-L1-VL2-L2-VH2-L3-VH1-L4-CH1-L5-CL-Fc;
   [0501] VH1-L1-VH2-L2-VL2-L3-VL1-L4-CH1-L5-CL-Fc;
   [0502] VL1-L1-VL2-L2-VH2-L3-VH1-L4-CL-L5-CH1-Fc; or
   [0503] VH1-L1-VH2-L2-VL2-L3-VL1-L4-CL-L5-CH1-Fc;
   [0504] wherein the second polypeptide has a structure represented by:
   [0505] VL3-VH3-CH1-Fc;
   [0506] VH3-VL3-CH1-Fc;
   [0507] VL3-VH3-CL-Fc;
   [0508] VH3-VL3-CL-Fc;
   [0509] VL3-VH3-CH1-CL-Fc;
   [0510] VH3-VL3-CH1-CL-Fc;
   [0511] VL3-VH3-CL-CH1-Fc;
   [0512] VH3-VL3-CL-CH1-Fc;
   [0513] VL3-CL-VH3-CH1-Fc;
   [0514] VL3-CH1-VH3-CL-Fc;
   [0515] VH3-CH1-VL3-CL-Fc;
   [0516] VH3-CL-VL3-CH1-Fc;
   [0517] VL3-L6-VH3-L7-CH1-Fc;
   [0518] VH3-L6-VL3-L7-CH1-Fc;
   [0519] VL3-L6-VH3-L7-CL-Fc;
   [0520] VH3-L6-VL3-L7-CL-Fc;
   [0521] VL3-L6-VH3-L7-CH1-L8-CL-Fc;
   [0522] VH3-L6-VL3-L7-CH1-L8-CL-Fc;
   [0523] VL3-L6-VH3-L7-CL-L8-CH1-Fc;
   [0524] VH3-L6-VL3-L7-CL-L8-CH1-Fc;
   [0525] VL3-L6-CL-L7-VH3-L8-CH1-Fc;
   [0526] VL3-L6-CH1-L7-VH3-L8-CL-Fc;
   [0527] VH3-L6-CH1-L7-VL3-L8-CL-Fc;
   [0528] VH3-L6-CL-L7-VL3-L8-CH1-Fc;
   [0529] VL3-VH3-L6-CH1-CL-Fc;
   [0530] VH3-VL3-L6-CH1-CL-Fc;
   [0531] VL3-VH3-L6-CL-CH1-Fc;
   [0532] VH3-VL3-L6-CL-CH1-Fc;
   [0533] VL3-CL-L6-VH3-CH1-Fc;
   [0534] VL3-CH1-L6-VH3-CL-Fc;
   [0535] VH3-CH1-L6-VL3-CL-Fc; or
   [0536] VH3-CL-L6-VL3-CH1-Fc;
   [0537] wherein:
   [0538] VL1 is a first immunoglobulin light chain variable region;
   [0539] VL2 is a second immunoglobulin light chain variable region;
   [0540] VL3 is a third immunoglobulin light chain variable region;
   [0541] VH1 is a first immunoglobulin heavy chain variable region;
   [0542] VH2 is a second immunoglobulin heavy chain variable region;
   [0543] VH3 is a third immunoglobulin heavy chain variable region;
   [0544] Fc is a region comprising an immunoglobulin heavy chain constant region 2 (CH2), an immunoglobulin heavy
   [0545] chain constant region 3 (CH3), and optionally, an immunoglobulin hinge;
   [0546] CH1 is an immunoglobulin heavy chain constant region 1;
   [0547] CL is an immunoglobulin light chain constant region; and
   [0548] L1, L2, L3, L4, L5, L6, L7 and L8 are amino acid linkers.
[0549] 5. The antigen binding polypeptide complex of clause 1, wherein the first polypeptide has a structure represented by:
   [0550] VL1-VL2-VH2-VH1-CH1-Fc;
   [0551] VH1-VH2-VL2-VL1-CH1-Fc;
   [0552] VL1-VL2-VH2-VH1-CL-Fc;
   [0553] VH1-VH2-VL2-VL1-CL-Fc;
   [0554] VL1-VL2-VH2-VH1-CH1-CL-Fc;
   [0555] VH1-VH2-VL2-VL1-CH1-CL-Fc;
   [0556] VL1-VL2-VH2-VH1-CL-CH1-Fc;
   [0557] VH1-VH2-VL2-VL1-CL-CH1-Fc;
   [0558] VL1-L1-VL2-L2-VH2-L3-VH1-L4-CH1-Fc;
   [0559] VH1-L1-VH2-L2-VL2-L3-VL1-L4-CH1-Fc;
   [0560] VL1-L1-VL2-L2-VH2-L3-VH1-L4-CL-Fc;
   [0561] VH1-L1-VH2-L2-VL2-L3-VL1-L4-CL-Fc;
   [0562] VL1-L1-VL2-L2-VH2-L3-VH1-L4-CH1-L5-CL-Fc;
   [0563] VH1-L1-VH2-L2-VL2-L3-VL1-L4-CH1-L5-CL-Fc;
   [0564] VL1-L1-VL2-L2-VH2-L3-VH1-L4-CL-L5-CH1-Fc;
   [0565] VH1-L1-VH2-L2-VL2-L3-VL1-L4-CL-L5-CH1-Fc;
   [0566] VL1-L1-VL2-L2-VH2-L3-VH1-L4-CH1-L5-Fc;
   [0567] VH1-L1-VH2-L2-VL2-L3-VL1-L4-CH1-L5-Fc;
   [0568] VL1-L1-VL2-L2-VH2-L3-VH1-L4-CL-L5-Fc;
   [0569] VH1-L1-VH2-L2-VL2-L3-VL1-L4-CL-L5-Fc;
   [0570] VL1-L1-VL2-L2-VH2-L3-VH1-L4-CH1-L5-CL-L6-Fc;
   [0571] VH1-L1-VH2-L2-VL2-L3-VL1-L4-CH1-L5-CL-L6-Fc;
   [0572] VL1-L1-VL2-L2-VH2-L3-VH1-L4-CL-L5-CH1-L6-Fc; or
   [0573] VH1-L1-VH2-L2-VL2-L3-VL1-L4-CL-L5-CH1-L6-Fc;
   [0574] wherein the second polypeptide has a structure represented by:
   [0575] VL3-VH3-CH1-Fc;
   [0576] VH3-VL3-CH1-Fc;
   [0577] VL3-VH3-CL-Fc;
   [0578] VH3-VL3-CL-Fc;
   [0579] VL3-VH3-CH1-CL-Fc;
   [0580] VH3-VL3-CH1-CL-Fc;
   [0581] VL3-VH3-CL-CH1-Fc;
   [0582] VH3-VL3-CL-CH1-Fc;
   [0583] VL3-CL-VH3-CH1-Fc;
   [0584] VL3-CH1-VH3-CL-Fc;
   [0585] VH3-CH1-VL3-CL-Fc;
   [0586] VH3-CL-VL3-CH1-Fc;
   [0587] VL3-L7-VH3-L8-CH1-Fc;
   [0588] VH3-L7-VL3-L8-CH1-Fc;
   [0589] VL3-L7-VH3-L8-CL-Fc;
   [0590] VH3-L7-VL3-L8-CL-Fc;
   [0591] VL3-L7-VH3-L8-CH1-L9-CL-Fc;
   [0592] VH3-L7-VL3-L8-CH1-L9-CL-Fc;
   [0593] VL3-L7-VH3-L8-CL-L9-CH1-Fc;
   [0594] VH3-L7-VL3-L8-CL-L9-CH1-Fc;
   [0595] VL3-L7-CL-L8-VH3-L9-CH1-Fc;
   [0596] VL3-L7-CH1-L8-VH3-L9-CL-Fc;
   [0597] VH3-L7-CH1-L8-VL3-L9-CL-Fc;
   [0598] VH3-L7-CL-L8-VL3-L9-CH1-Fc;
   [0599] VL3-L7-VH3-L8-CH1-L9-CL-L10-Fc;
   [0600] VH3-L7-VL3-L8-CH1-L9-CL-L10-Fc;
   [0601] VL3-L7-VH3-L8-CL-L9-CH1-L10-Fc;
   [0602] VH3-L7-VL3-L8-CL-L9-CH1-L10-Fc;
   [0603] VL3-L7-CL-L8-VH3-L9-CH1-L10-Fc;
   [0604] VL3-L7-CH1-L8-VH3-L9-CL-L10-Fc;
   [0605] VH3-L7-CH1-L8-VL3-L9-CL-L10-Fc;
   [0606] VH3-L7-CL-L8-VL3-L9-CH1-L10-Fc;
   [0607] VL3-VH3-L7-CH1-CL-Fc;
   [0608] VH3-VL3-L7-CH1-CL-Fc;
   [0609] VL3-VH3-L7-CL-CH1-Fc;
   [0610] VH3-VL3-L7-CL-CH1-Fc;
   [0611] VL3-CL-L7-VH3-CH1-Fc;
   [0612] VL3-CH1-L7-VH3-CL-Fc;
   [0613] VH3-CH1-L7-VL3-CL-Fc; or
   [0614] VH3-CL-L7-VL3-CH1-Fc; wherein:
   [0615] VL1 is a first immunoglobulin light chain variable region; VL2 is a second immunoglobulin light chain variable region; VL3 is a third immunoglobulin light chain variable region; VH1 is a first immunoglobulin heavy chain variable region; VH2 is a second immunoglobulin heavy chain variable region; VH3 is a third immunoglobulin heavy chain variable region; Fc is a region comprising an immunoglobulin heavy chain constant region 2 (CH2), an immunoglobulin heavy chain constant region 3 (CH3), and optionally, an immunoglobulin hinge; CH1 is an immunoglobulin heavy chain constant region 1; CL is an immunoglobulin light chain constant region; and L1, L2, L3, L4, L5, L6, L7, L8, L9 and L10 are amino acid linkers.
[0616] 6. The antigen binding polypeptide complex of clause 1, wherein the first polypeptide has a structure represented by:
   [0617] VL1-VL2-VH2-VH1;
   [0618] VH1-VH2-VL2-VL1;
   [0619] VL1-L1-VL2-L2-VH2-L3-VH1;
   [0620] VH1-L1-VH2-L2-VL2-L3-VL1;
   [0621] VL1-VL2-VH2-VH1-Fc;
   [0622] VH1-VH2-VL2-VL1-Fc;
   [0623] VL1-L1-VL2-L2-VH2-L3-VH1-Fc;
   [0624] VH1-L1-VH2-L2-VL2-L3-VL1-Fc;
   [0625] VL1-L1-VL2-L2-VH2-L3-VH1-L4-Fc;
   [0626] VH1-L1-VH2-L2-VL2-L3-VL1-L4-Fc;
   [0627] VL1-VL2-VH2-VH1-CH1;
   [0628] VH1-VH2-VL2-VL1-CH1;
   [0629] VL1-VL2-VH2-VH1-CL;
   [0630] VH1-VH2-VL2-VL1-CL;
   [0631] VL1-VL2-VH2-VH1-CH1-CL;
   [0632] VH1-VH2-VL2-VL1-CH1-CL;
   [0633] VL1-VL2-VH2-VH1-CL-CH1;
   [0634] VH1-VH2-VL2-VL1-CL-CH1;
   [0635] VL1-L1-VL2-L2-VH2-L3-VH1-L4-CH1;
   [0636] VH1-L1-VH2-L2-VL2-L3-VL1-L4-CH1;
   [0637] VL1-L1-VL2-L2-VH2-L3-VH1-L4-CL;
   [0638] VH1-L1-VH2-L2-VL2-L3-VL1-L4-CL;
   [0639] VL1-L1-VL2-L2-VH2-L3-VH1-L4-CH1-L5-CL;
   [0640] VH1-L1-VH2-L2-VL2-L3-VL1-L4-CH1-L5-CL;
   [0641] VL1-L1-VL2-L2-VH2-L3-VH1-L4-CL-L5-CH1;
   [0642] VH1-L1-VH2-L2-VL2-L3-VL1-L4-CL-L5-CH1;
   [0643] VL1-VL2-VH2-VH1-CH1-Fc;
   [0644] VH1-VH2-VL2-VL1-CH1-Fc;
   [0645] VL1-VL2-VH2-VH1-CL-Fc;
   [0646] VH1-VH2-VL2-VL1-CL-Fc;
   [0647] VL1-VL2-VH2-VH1-CH1-CL-Fc;
   [0648] VH1-VH2-VL2-VL1-CH1-CL-Fc;
   [0649] VL1-VL2-VH2-VH1-CL-CH1-Fc;
   [0650] VH1-VH2-VL2-VL1-CL-CH1-Fc;
   [0651] VL1-L1-VL2-L2-VH2-L3-VH1-L4-CH1-Fc;
   [0652] VH1-L1-VH2-L2-VL2-L3-VL1-L4-CH1-Fc;
   [0653] VL1-L1-VL2-L2-VH2-L3-VH1-L4-CL-Fc;
   [0654] VH1-L1-VH2-L2-VL2-L3-VL1-L4-CL-Fc;
   [0655] VL1-L1-VL2-L2-VH2-L3-VH1-L4-CH1-L5-CL-Fc;
   [0656] VH1-L1-VH2-L2-VL2-L3-VL1-L4-CH1-L5-CL-Fc;
   [0657] VL1-L1-VL2-L2-VH2-L3-VH1-L4-CL-L5-CH1-Fc; or
   [0658] VH1-L1-VH2-L2-VL2-L3-VL1-L4-CL-L5-CH1-Fc;
   [0659] wherein the second polypeptide has a structure represented by:
   [0660] VL3-VH3;
   [0661] VH3-VL3;
   [0662] VL3-L4-VH3;
   [0663] VH3-L4-VL3;
   [0664] VL3-VH3-Fc;
   [0665] VH3-VL3-Fc;
   [0666] VL3-L4-VH3-Fc;
   [0667] VH3-L4-VL3-Fc;
   [0668] VL3-VH3-CH1;
   [0669] VH3-VL3-CH1;
   [0670] VL3-VH3-CL;
   [0671] VH3-VL3-CL;
   [0672] VL3-VH3-CH1-CL;
   [0673] VH3-VL3-CH1-CL;
   [0674] VL3-VH3-CL-CH1;
   [0675] VH3-VL3-CL-CH1;
   [0676] VL3-CL-VH3-CH1;
   [0677] VL3-CH1-VH3-CL;
   [0678] VH3-CH1-VL3-CL;
   [0679] VH3-CL-VL3-CH1;
   [0680] VL3-L6-VH3-L7-CH1;
   [0681] VH3-L6-VL3-L7-CH1;
   [0682] VL3-L6-VH3-L7-CL;
   [0683] VH3-L6-VL3-L7-CL;
   [0684] VL3-L6-VH3-L7-CH1-L8-CL;
   [0685] VH3-L6-VL3-L7-CH1-L8-CL;
   [0686] VL3-L6-VH3-L7-CL-L8-CH1;
   [0687] VH3-L6-VL3-L7-CL-L8-CH1;
   [0688] VL3-L6-CL-L7-VH3-L8-CH1;
   [0689] VL3-L6-CH1-L7-VH3-L8-CL;
   [0690] VH3-L6-CH1-L7-VL3-L8-CL;
   [0691] VH3-L6-CL-L7-VL3-L8-CH1;
   [0692] VL3-VH3-L6-CH1-CL;
   [0693] VH3-VL3-L6-CH1-CL;
   [0694] VL3-VH3-L6-CL-CH1;
   [0695] VH3-VL3-L6-CL-CH1;
   [0696] VL3-CL-L6-VH3-CH1;
   [0697] VL3-CH1-L6-VH3-CL;
   [0698] VH3-CH1-L6-VL3-CL;
   [0699] VH3-CL-L6-VL3-CH1;
   [0700] VL3-VH3-CH1-Fc;
   [0701] VH3-VL3-CH1-Fc;
   [0702] VL3-VH3-CL-Fc;
   [0703] VH3-VL3-CL-Fc;
   [0704] VL3-VH3-CH1-CL-Fc;
   [0705] VH3-VL3-CH1-CL-Fc;
   [0706] VL3-VH3-CL-CH1-Fc;
   [0707] VH3-VL3-CL-CH1-Fc;
   [0708] VL3-CL-VH3-CH1-Fc;
   [0709] VL3-CH1-VH3-CL-Fc;
   [0710] VH3-CH1-VL3-CL-Fc;
   [0711] VH3-CL-VL3-CH1-Fc;
   [0712] VL3-L6-VH3-L7-CH1-Fc;
   [0713] VH3-L6-VL3-L7-CH1-Fc;
   [0714] VL3-L6-VH3-L7-CL-Fc;
   [0715] VH3-L6-VL3-L7-CL-Fc;
   [0716] VL3-L6-VH3-L7-CH1-L8-CL-Fc;
   [0717] VH3-L6-VL3-L7-CH1-L8-CL-Fc;
   [0718] VL3-L6-VH3-L7-CL-L8-CH1-Fc;
   [0719] VH3-L6-VL3-L7-CL-L8-CH1-Fc;
   [0720] VL3-L6-CL-L7-VH3-L8-CH1-Fc;
   [0721] VL3-L6-CH1-L7-VH3-L8-CL-Fc;
   [0722] VH3-L6-CH1-L7-VL3-L8-CL-Fc;
   [0723] VH3-L6-CL-L7-VL3-L8-CH1-Fc;
   [0724] VL3-VH3-L6-CH1-CL-Fc;
   [0725] VH3-VL3-L6-CH1-CL-Fc;
   [0726] VL3-VH3-L6-CL-CH1-Fc;
   [0727] VH3-VL3-L6-CL-CH1-Fc;
   [0728] VL3-CL-L6-VH3-CH1-Fc;
   [0729] VL3-CH1-L6-VH3-CL-Fc;
   [0730] VH3-CH1-L6-VL3-CL-Fc; or
   [0731] VH3-CL-L6-VL3-CH1-Fc;
   [0732] wherein:
   [0733] VL1 is a first immunoglobulin light chain variable region;
   [0734] VL2 is a second immunoglobulin light chain variable region;
   [0735] VL3 is a third immunoglobulin light chain variable region;
   [0736] VH1 is a first immunoglobulin heavy chain variable region;
   [0737] VH2 is a second immunoglobulin heavy chain variable region;
   [0738] VH3 is a third immunoglobulin heavy chain variable region;
   [0739] Fc is a region comprising an immunoglobulin heavy chain constant region 2 (CH2), an immunoglobulin heavy chain constant region 3 (CH3), and optionally, an immunoglobulin hinge;
   [0740] CH1 is an immunoglobulin heavy chain constant region 1;
   [0741] CL is an immunoglobulin light chain constant region; and
   [0742] L1, L2, L3, L4, L5, L6, L7 and L8 are amino acid linkers.
[0743] 7. The antigen binding polypeptide complex of clause 1, wherein the first polypeptide has a structure represented by:
   [0744] VL1-VL2-VH2-VH1;
   [0745] VH1-VH2-VL2-VL1;
   [0746] VL1-L1-VL2-L2-VH2-L3-VH1;
   [0747] VH1-L1-VH2-L2-VL2-L3-VL1;
   [0748] VL1-VL2-VH2-VH1-Fc;
   [0749] VH1-VH2-VL2-VL1-Fc;
   [0750] VL1-L1-VL2-L2-VH2-L3-VH1-Fc;
   [0751] VH1-L1-VH2-L2-VL2-L3-VL1-Fc;
   [0752] VL1-L1-VL2-L2-VH2-L3-VH1-L4-Fc;
   [0753] VH1-L1-VH2-L2-VL2-L3-VL1-L4-Fc;
   [0754] VL1-VL2-VH2-VH1-CH1;
   [0755] VH1-VH2-VL2-VL1-CH1;
   [0756] VL1-VL2-VH2-VH1-CL;
   [0757] VH1-VH2-VL2-VL1-CL;
   [0758] VL1-VL2-VH2-VH1-CH1-CL;
   [0759] VH1-VH2-VL2-VL1-CH1-CL;
   [0760] VL1-VL2-VH2-VH1-CL-CH1;
   [0761] VH1-VH2-VL2-VL1-CL-CH1;
   [0762] VL1-L1-VL2-L2-VH2-L3-VH1-L4-CH1;
   [0763] VH1-L1-VH2-L2-VL2-L3-VL1-L4-CH1;
   [0764] VL1-L1-VL2-L2-VH2-L3-VH1-L4-CL;
   [0765] VH1-L1-VH2-L2-VL2-L3-VL1-L4-CL;
   [0766] VL1-L1-VL2-L2-VH2-L3-VH1-L4-CH1-L5-CL;
   [0767] VH1-L1-VH2-L2-VL2-L3-VL1-L4-CH1-L5-CL;
   [0768] VL1-L1-VL2-L2-VH2-L3-VH1-L4-CL-L5-CH1;
   [0769] VH1-L1-VH2-L2-VL2-L3-VL1-L4-CL-L5-CH1;
   [0770] VL1-VL2-VH2-VH1-CH1-Fc;
   [0771] VH1-VH2-VL2-VL1-CH1-Fc;
   [0772] VL1-VL2-VH2-VH1-CL-Fc;
   [0773] VH1-VH2-VL2-VL1-CL-Fc;
   [0774] VL1-VL2-VH2-VH1-CH1-CL-Fc;
   [0775] VH1-VH2-VL2-VL1-CH1-CL-Fc;
   [0776] VL1-VL2-VH2-VH1-CL-CH1-Fc;
   [0777] VH1-VH2-VL2-VL1-CL-CH1-Fc;
   [0778] VL1-L1-VL2-L2-VH2-L3-VH1-L4-CH1-Fc;
   [0779] VH1-L1-VH2-L2-VL2-L3-VL1-L4-CH1-Fc;
   [0780] VL1-L1-VL2-L2-VH2-L3-VH1-L4-CL-Fc;
   [0781] VH1-L1-VH2-L2-VL2-L3-VL1-L4-CL-Fc;
   [0782] VL1-L1-VL2-L2-VH2-L3-VH1-L4-CH1-L5-CL-Fc;
   [0783] VH1-L1-VH2-L2-VL2-L3-VL1-L4-CH1-L5-CL-Fc;
   [0784] VL1-L1-VL2-L2-VH2-L3-VH1-L4-CL-L5-CH1-Fc;
   [0785] VH1-L1-VH2-L2-VL2-L3-VL1-L4-CL-L5-CH1-Fc;
   [0786] VL1-L1-VL2-L2-VH2-L3-VH1-L4-CH1-L5-Fc;
   [0787] VH1-L1-VH2-L2-VL2-L3-VL1-L4-CH1-L5-Fc;
   [0788] VL1-L1-VL2-L2-VH2-L3-VH1-L4-CL-L5-Fc;
   [0789] VH1-L1-VH2-L2-VL2-L3-VL1-L4-CL-L5-Fc;
   [0790] VL1-L1-VL2-L2-VH2-L3-VH1-L4-CH1-L5-CL-L6-Fc;
   [0791] VH1-L1-VH2-L2-VL2-L3-VL1-L4-CH1-L5-CL-L6-Fc;
   [0792] VL1-L1-VL2-L2-VH2-L3-VH1-L4-CL-L5-CH1-L6-Fc; or
   [0793] VH1-L1-VH2-L2-VL2-L3-VL1-L4-CL-L5-CH1-L6-Fc;
   [0794] wherein the second polypeptide has a structure represented by:
   [0795] VL3-VH3;
   [0796] VH3-VL3;
   [0797] VL3-L4-VH3;
   [0798] VH3-L4-VL3;
   [0799] VL3-VH3-Fc;
   [0800] VH3-VL3-Fc;
   [0801] VL3-L4-VH3-Fc;
   [0802] VH3-L4-VL3-Fc;
   [0803] VL3-VH3-CH1;
   [0804] VH3-VL3-CH1;
   [0805] VL3-VH3-CL;
   [0806] VH3-VL3-CL;
   [0807] VL3-VH3-CH1-CL;
   [0808] VH3-VL3-CH1-CL;
   [0809] VL3-VH3-CL-CH1;
   [0810] VH3-VL3-CL-CH1;
   [0811] VL3-CL-VH3-CH1;
   [0812] VL3-CH1-VH3-CL;
   [0813] VH3-CH1-VL3-CL;
   [0814] VH3-CL-VL3-CH1;
   [0815] VL3-L7-VH3-L8-CH1;
   [0816] VH3-L7-VL3-L8-CH1;
   [0817] VL3-L7-VH3-L8-CL;
   [0818] VH3-L7-VL3-L8-CL;
   [0819] VL3-L7-VH3-L8-CH1-L9-CL;
   [0820] VH3-L7-VL3-L8-CH1-L9-CL;
   [0821] VL3-L7-VH3-L8-CL-L9-CH1;
   [0822] VH3-L7-VL3-L8-CL-L9-CH1;
   [0823] VL3-L7-CL-L8-VH3-L9-CH1;
   [0824] VL3-L7-CH1-L8-VH3-L9-CL;
   [0825] VH3-L7-CH1-L8-VL3-L9-CL;
   [0826] VH3-L7-CL-L8-VL3-L9-CH1;
   [0827] VL3-VH3-L7-CH1-CL;
   [0828] VH3-VL3-L7-CH1-CL;
   [0829] VL3-VH3-L7-CL-CH1;
   [0830] VH3-VL3-L7-CL-CH1;
   [0831] VL3-CL-L7-VH3-CH1;
   [0832] VL3-CH1-L7-VH3-CL;
   [0833] VH3-CH1-L7-VL3-CL;
   [0834] VH3-CL-L7-VL3-CH1;
   [0835] VL3-VH3-CH1-Fc;
   [0836] VH3-VL3-CH1-Fc;
   [0837] VL3-VH3-CL-Fc;
   [0838] VH3-VL3-CL-Fc;
   [0839] VL3-VH3-CH1-CL-Fc;
   [0840] VH3-VL3-CH1-CL-Fc;
   [0841] VL3-VH3-CL-CH1-Fc;
   [0842] VH3-VL3-CL-CH1-Fc;
   [0843] VL3-CL-VH3-CH1-Fc;
   [0844] VL3-CH1-VH3-CL-Fc;
   [0845] VH3-CH1-VL3-CL-Fc;
   [0846] VH3-CL-VL3-CH1-Fc;
   [0847] VL3-L7-VH3-L8-CH1-Fc;
   [0848] VH3-L7-VL3-L8-CH1-Fc;
   [0849] VL3-L7-VH3-L8-CL-Fc;
   [0850] VH3-L7-VL3-L8-CL-Fc;
   [0851] VL3-L7-VH3-L8-CH1-L9-CL-Fc;
   [0852] VH3-L7-VL3-L8-CH1-L9-CL-Fc;
   [0853] VL3-L7-VH3-L8-CL-L9-CH1-Fc;
   [0854] VH3-L7-VL3-L8-CL-L9-CH1-Fc;
   [0855] VL3-L7-CL-L8-VH3-L9-CH1-Fc;
   [0856] VL3-L7-CH1-L8-VH3-L9-CL-Fc;
   [0857] VH3-L7-CH1-L8-VL3-L9-CL-Fc;
   [0858] VH3-L7-CL-L8-VL3-L9-CH1-Fc;
   [0859] VL3-L7-VH3-L8-CH1-L9-Fc;
   [0860] VH3-L7-VL3-L8-CH1-L9-Fc;
   [0861] VL3-L7-VH3-L8-CL-L9-Fc;
   [0862] VH3-L7-VL3-L8-CL-L9-Fc;
   [0863] VL3-L7-VH3-L8-CH1-L9-CL-L10-Fc;
   [0864] VH3-L7-VL3-L8-CH1-L9-CL-L10-Fc;
   [0865] VL3-L7-VH3-L8-CL-L9-CH1-L10-Fc;
   [0866] VH3-L7-VL3-L8-CL-L9-CH1-L10-Fc;
   [0867] VL3-L7-CL-L8-VH3-L9-CH1-L10-Fc;
   [0868] VL3-L7-CH1-L8-VH3-L9-CL-L10-Fc;
   [0869] VH3-L7-CH1-L8-VL3-L9-CL-L10-Fc;
   [0870] VH3-L7-CL-L8-VL3-L9-CH1-L10-Fc;
   [0871] VL3-VH3-L7-CH1-CL-Fc;
   [0872] VH3-VL3-L7-CH1-CL-Fc;
   [0873] VL3-VH3-L7-CL-CH1-Fc;
   [0874] VH3-VL3-L7-CL-CH1-Fc;
   [0875] VL3-CL-L7-VH3-CH1-Fc;
   [0876] VL3-CH1-L7-VH3-CL-Fc;
   [0877] VH3-CH1-L7-VL3-CL-Fc; or
   [0878] VH3-CL-L7-VL3-CH1-Fc;
   [0879] wherein:
   [0880] VL1 is a first immunoglobulin light chain variable region;
   [0881] VL2 is a second immunoglobulin light chain variable region;
   [0882] VL3 is a third immunoglobulin light chain variable region;
   [0883] VH1 is a first immunoglobulin heavy chain variable region;
   [0884] VH2 is a second immunoglobulin heavy chain variable region;
   [0885] VH3 is a third immunoglobulin heavy chain variable region;
   [0886] Fc is a region comprising an immunoglobulin heavy chain constant region 2 (CH2), an immunoglobulin heavy chain constant region 3 (CH3), and optionally, an immunoglobulin hinge;
   [0887] CH1 is an immunoglobulin heavy chain constant region 1;
   [0888] CL is an immunoglobulin light chain constant region; and
   [0889] L1, L2, L3, L4, L5, L6, L7, L8, L9 and L10 are amino acid linkers.
[0890] 8. An antigen binding polypeptide complex comprising a first polypeptide, a second polypeptide, and a third polypeptide;
   [0891] wherein the first polypeptide has a structure represented by:
   [0892] VL1-VL2-VH2-VH1;
   [0893] VH1-VH2-VL2-VL1;
   [0894] VL1-L1-VL2-L2-VH2-L3-VH1; or
   [0895] VH1-L1-VH2-L2-VL2-L3-VL1;
   [0896] wherein the second polypeptide has a structure represented by: VL3;
   [0897] wherein the third polypeptide has a structure represented by: VH3;
   [0898] wherein:
   [0899] VL1 is a first immunoglobulin light chain variable region;
   [0900] VL2 is a second immunoglobulin light chain variable region;
   [0901] VL3 is a third immunoglobulin light chain variable region;
   [0902] VH1 is a first immunoglobulin heavy chain variable region;
   [0903] VH2 is a second immunoglobulin heavy chain variable region;
   [0904] VH3 is a third immunoglobulin heavy chain variable region; and
   [0905] L1, L2 and L3 are amino acid linkers.
[0906] 9. The antigen binding polypeptide complex of clause 8, wherein the first polypeptide has a structure represented by:
   [0907] VL1-VL2-VH2-VH1-Fc;
   [0908] VH1-VH2-VL2-VL1-Fc;
   [0909] VL1-L1-VL2-L2-VH2-L3-VH1-Fc;
   [0910] VH1-L1-VH2-L2-VL2-L3-VL1-Fc;
   [0911] VL1-L1-VL2-L2-VH2-L3-VH1-L4-Fc; or
   [0912] VH11-L1-VH2-L2-VL2-L3-VL1-L4-Fc;
   [0913] wherein the second polypeptide has a structure represented by:
   [0914] VL3; or
   [0915] VL3-L1;
   [0916] wherein the third polypeptide has a structure represented by:
   [0917] VH3-Fc; or
   [0918] VH3-L1-Fc;
   [0919] wherein:
   [0920] VL1 is a first immunoglobulin light chain variable region;
   [0921] VL2 is a second immunoglobulin light chain variable region;
   [0922] VL3 is a third immunoglobulin light chain variable region;
   [0923] VH1 is a first immunoglobulin heavy chain variable region;
   [0924] VH2 is a second immunoglobulin heavy chain variable region;
   [0925] VH3 is a third immunoglobulin heavy chain variable region;
   [0926] Fc is a region comprising an immunoglobulin heavy chain constant region 2 (CH2), an immunoglobulin heavy chain constant region 3 (CH3), and optionally, an immunoglobulin hinge; and
   [0927] L1, L2, L3 and L4 are amino acid linkers.
[0928] 10. The antigen binding polypeptide complex of clause 8, wherein the first polypeptide has a structure represented by:
   [0929] VL1-VL2-VH2-VH1-Fc;
   [0930] VH1-VH2-VL2-VL1-Fc;
   [0931] VL1-L1-VL2-L2-VH2-L3-VH1-Fc;
   [0932] VH1-L1-VH2-L2-VL2-L3-VL1-Fc;
   [0933] VL1-L1-VL2-L2-VH2-L3-VH1-L4-Fc; or
   [0934] VH1-L1-VH2-L2-VL2-L3-VL1-L4-Fc;
   [0935] wherein the second polypeptide has a structure represented by:
   [0936] VL3; or
   [0937] VL3-L5;
   [0938] wherein the third polypeptide has a structure represented by:
   [0939] VH3-Fc; or
   [0940] VH3-L6-Fc;
   [0941] wherein:
   [0942] VL1 is a first immunoglobulin light chain variable region;
   [0943] VL2 is a second immunoglobulin light chain variable region;
   [0944] VL3 is a third immunoglobulin light chain variable region;
   [0945] VH1 is a first immunoglobulin heavy chain variable region;
   [0946] VH2 is a second immunoglobulin heavy chain variable region;
   [0947] VH3 is a third immunoglobulin heavy chain variable region;
   [0948] Fc is a region comprising an immunoglobulin heavy chain constant region 2 (CH2), an immunoglobulin heavy chain constant region 3 (CH3), and optionally, an immunoglobulin hinge; and
   [0949] L1, L2, L3, L4, L5 and L6 are amino acid linkers.
[0950] 11. The antigen binding polypeptide complex of clause 8, wherein the first polypeptide has a structure represented by:
   [0951] VL1-VL2-VH2-VH1-Fc;
   [0952] VH1-VH2-VL2-VL1-Fc;
   [0953] VL1-L1-VL2-L2-VH2-L3-VH1-Fc;
   [0954] VH1-L1-VH2-L2-VL2-L3-VL1-Fc;
   [0955] VL1-L1-VL2-L2-VH2-L3-VH1-L4-Fc; or
   [0956] VH1-L1-VH2-L2-VL2-L3-VL1-L4-Fc;
   [0957] wherein the second polypeptide has a structure represented by:
   [0958] VL3-Fc; or
   [0959] VL3-L1-Fc;
   [0960] wherein the third polypeptide has a structure represented by:
   [0961] VH3; or
   [0962] VH3-L1;
   [0963] wherein:
   [0964] VL1 is a first immunoglobulin light chain variable region;
   [0965] VL2 is a second immunoglobulin light chain variable region;
   [0966] VL3 is a third immunoglobulin light chain variable region;
   [0967] VH1 is a first immunoglobulin heavy chain variable region;
   [0968] VH2 is a second immunoglobulin heavy chain variable region;
   [0969] VH3 is a third immunoglobulin heavy chain variable region;
   [0970] Fc is a region comprising an immunoglobulin heavy chain constant region 2 (CH2), an immunoglobulin heavy chain constant region 3 (CH3), and optionally, an immunoglobulin hinge; and
   [0971] L1, L2, L3 and L4 are amino acid linkers.
[0972] 12. The antigen binding polypeptide complex of clause 8, wherein the first polypeptide has a structure represented by:
   [0973] VL1-VL2-VH2-VH1-Fc;
   [0974] VH1-VH2-VL2-VL1-Fc;
   [0975] VL1-L1-VL2-L2-VH2-L3-VH1-Fc;
   [0976] VH1-L1-VH2-L2-VL2-L3-VL1-Fc;
   [0977] VL1-L1-VL2-L2-VH2-L3-VH1-L4-Fc; or
   [0978] VH1-L1-VH2-L2-VL2-L3-VL1-L4-Fc;
   [0979] wherein the second polypeptide has a structure represented by:
   [0980] VL3-Fc; or
   [0981] VL3-L5-Fc;
   [0982] wherein the third polypeptide has a structure represented by:
   [0983] VH3; or
   [0984] VH3-L6;
   [0985] wherein:
   [0986] VL1 is a first immunoglobulin light chain variable region;
   [0987] VL2 is a second immunoglobulin light chain variable region;
   [0988] VL3 is a third immunoglobulin light chain variable region;
   [0989] VH1 is a first immunoglobulin heavy chain variable region;
   [0990] VH2 is a second immunoglobulin heavy chain variable region;
   [0991] VH3 is a third immunoglobulin heavy chain variable region;
   [0992] Fc is a region comprising an immunoglobulin heavy chain constant region 2 (CH2), an immunoglobulin heavy chain constant region 3 (CH3), and optionally, an immunoglobulin hinge; and
   [0993] L1, L2, L3, L4, L5 and L6 are amino acid linkers.
[0994] 13. The antigen binding polypeptide complex of clause 8, wherein the first polypeptide has a structure represented by:
   [0995] VL1-VL2-VH2-VH1-CH1;
   [0996] VH1-VH2-VL2-VL1-CH1;
   [0997] VL1-VL2-VH2-VH1-CL;
   [0998] VH1-VH2-VL2-VL1-CL;
   [0999] VL1-VL2-VH2-VH1-CH1-CL;
   [1000] VH1-VH2-VL2-VL1-CH1-CL;
   [1001] VL1-VL2-VH2-VH1-CL-CH1;
   [1002] VH1-VH2-VL2-VL1-CL-CH1;
   [1003] VL1-L1-VL2-L2-VH2-L3-VH1-L4-CH1;
   [1004] VH1-L1-VH2-L2-VL2-L3-VL1-L4-CH1;
   [1005] VL1-L1-VL2-L2-VH2-L3-VH1-L4-CL;
   [1006] VH1-L1-VH2-L2-VL2-L3-VL1-L4-CL;
   [1007] VL1-L1-VL2-L2-VH2-L3-VH1-L4-CH1-L5-CL;
   [1008] VH1-L1-VH2-L2-VL2-L3-VL1-L4-CH1-L5-CL;
   [1009] VL1-L1-VL2-L2-VH2-L3-VH1-L4-CL-L5-CH1; or
   [1010] VH1-L1-VH2-L2-VL2-L3-VL1-L4-CL-L5-CH1;
   [1011] wherein the second polypeptide has a structure represented by:
   [1012] VL3-CH1;
   [1013] VL3-CL;
   [1014] VL3-L1-CH1; or
   [1015] VL3-L1-CL;
   [1016] wherein the third polypeptide has a structure represented by:
   [1017] VH3-CH1;
   [1018] VH3-CL;
   [1019] VH3-L1-CH1; or
   [1020] VH3-L1-CL;
   [1021] wherein:
   [1022] VL1 is a first immunoglobulin light chain variable region;
   [1023] VL2 is a second immunoglobulin light chain variable region;
   [1024] VL3 is a third immunoglobulin light chain variable region;
   [1025] VH1 is a first immunoglobulin heavy chain variable region;
   [1026] VH2 is a second immunoglobulin heavy chain variable region;
   [1027] VH3 is a third immunoglobulin heavy chain variable region;
   [1028] CH1 is an immunoglobulin heavy chain constant region 1;
   [1029] CL is an immunoglobulin light chain constant region; and
   [1030] L1, L2, L3, L4 and L5 are amino acid linkers.
[1031] 14. The antigen binding polypeptide complex of clause 8, wherein the first polypeptide has a structure represented by:
   [1032] VL1-VL2-VH2-VH1-CH1;
   [1033] VH1-VH2-VL2-VL1-CH1;
   [1034] VL1-VL2-VH2-VH1-CL;
   [1035] VH1-VH2-VL2-VL1-CL;
   [1036] VL1-VL2-VH2-VH1-CH1-CL;
   [1037] VH1-VH2-VL2-VL1-CH1-CL;
   [1038] VL1-VL2-VH2-VH1-CL-CH1;
   [1039] VH1-VH2-VL2-VL1-CL-CH1;
   [1040] VL1-L1-VL2-L2-VH2-L3-VH1-L4-CH1;
   [1041] VH1-L1-VH2-L2-VL2-L3-VL1-L4-CH1;
   [1042] VL1-L1-VL2-L2-VH2-L3-VH1-L4-CL;
   [1043] VH1-L1-VH2-L2-VL2-L3-VL1-L4-CL;
   [1044] VL1-L1-VL2-L2-VH2-L3-VH1-L4-CH1-L5-CL;
   [1045] VH1-L1-VH2-L2-VL2-L3-VL1-L4-CH1-L5-CL;
   [1046] VL1-L1-VL2-L2-VH2-L3-VH1-L4-CL-L5-CH1; or
   [1047] VH1-L1-VH2-L2-VL2-L3-VL1-L4-CL-L5-CH1;
   [1048] wherein the second polypeptide has a structure represented by:
   [1049] VL3-CH1;
   [1050] VL3-CL;
   [1051] VL3-L6-CH1; or
   [1052] VL3-L6-CL;
   [1053] wherein the third polypeptide has a structure represented by:
   [1054] VH3-CH1;
   [1055] VH3-CL;
   [1056] VH3-L7-CH1; or
   [1057] VH3-L7-CL;
   [1058] wherein:
   [1059] VL1 is a first immunoglobulin light chain variable region;
   [1060] VL2 is a second immunoglobulin light chain variable region;
   [1061] VL3 is a third immunoglobulin light chain variable region;
   [1062] VH1 is a first immunoglobulin heavy chain variable region;
   [1063] VH2 is a second immunoglobulin heavy chain variable region;
   [1064] VH3 is a third immunoglobulin heavy chain variable region;
   [1065] CH1 is an immunoglobulin heavy chain constant region 1;
   [1066] CL is an immunoglobulin light chain constant region; and
   [1067] L1, L2, L3, L4, L5, L6 and L7 are amino acid linkers.
[1068] 15. The antigen binding polypeptide complex of clause 8, wherein the first polypeptide has a structure represented by:
   [1069] VL1-VL2-VH2-VH1;
   [1070] VH1-VH2-VL2-VL1;
   [1071] VL1-L1-VL2-L2-VH2-L3-VH1;
   [1072] VH1-L1-VH2-L2-VL2-L3-VL1;
   [1073] VL1-VL2-VH2-VH1-Fc;
   [1074] VH1-VH2-VL2-VL1-Fc;
   [1075] VL1-L1-VL2-L2-VH2-L3-VH1-Fc;
   [1076] VH1-L1-VH2-L2-VL2-L3-VL11-Fc;
   [1077] VL1-L1-VL2-L2-VH2-L3-VH1-L4-Fc;
   [1078] VH1-L1-VH2-L2-VL2-L3-VL1-L4-Fc;
   [1079] VL1-VL2-VH2-VH1-CH1;
   [1080] VH1-VH2-VL2-VL1-CH1;
   [1081] VL1-VL2-VH2-VH1-CL;
   [1082] VH1-VH2-VL2-VL1-CL;
   [1083] VL1-VL2-VH2-VH1-CH1-CL;
   [1084] VH1-VH2-VL2-VL1-CH1-CL;
   [1085] VL1-VL2-VH2-VH1-CL-CH1;
   [1086] VH1-VH2-VL2-VL1-CL-CH1;
   [1087] VL1-L1-VL2-L2-VH2-L3-VH1-L4-CH1;
   [1088] VH1-L1-VH2-L2-VL2-L3-VL1-L4-CH1;
   [1089] VL1-L1-VL2-L2-VH2-L3-VH1-L4-CL;
   [1090] VH1-L1-VH2-L2-VL2-L3-VL1-L4-CL;
   [1091] VL1-L1-VL2-L2-VH2-L3-VH1-L4-CH1-L5-CL;
   [1092] VH1-L1-VH2-L2-VL2-L3-VL1-L4-CH1-L5-CL;
   [1093] VL1-L1-VL2-L2-VH2-L3-VH1-L4-CL-L5-CH1;
   [1094] VH1-L1-VH2-L2-VL2-L3-VL1-L4-CL-L5-CH1;
   [1095] VL1-VL2-VH2-VH1-CH1-Fc;
   [1096] VH1-VH2-VL2-VL1-CH1-Fc;
   [1097] VL1-VL2-VH2-VH1-CL-Fc;
   [1098] VH1-VH2-VL2-VL1-CL-Fc;
   [1099] VL1-VL2-VH2-VH1-CH1-CL-Fc;
   [1100] VH1-VH2-VL2-VL1-CH1-CL-Fc;
   [1101] VL1-VL2-VH2-VH1-CL-CH1-Fc;
   [1102] VH1-VH2-VL2-VL1-CL-CH1-Fc;
   [1103] VL1-L1-VL2-L2-VH2-L3-VH1-L4-CH1-Fc;
   [1104] VH1-L1-VH2-L2-VL2-L3-VL1-L4-CH1-Fc;
   [1105] VL1-L1-VL2-L2-VH2-L3-VH1-L4-CL-Fc;
   [1106] VH1-L1-VH2-L2-VL2-L3-VL1-L4-CL-Fc;
   [1107] VL1-L1-VL2-L2-VH2-L3-VH1-L4-CH1-L5-CL-Fc;
   [1108] VH1-L1-VH2-L2-VL2-L3-VL1-L4-CH1-L5-CL-Fc;
   [1109] VL1-L1-VL2-L2-VH2-L3-VH1-L4-CL-L5-CH1-Fc; or
   [1110] VH1-L1-VH2-L2-VL2-L3-VL1-L4-CL-L5-CH1-Fc;
   [1111] wherein the second polypeptide has a structure represented by:
   [1112] VL3;
   [1113] VL3-Fc;
   [1114] VL3-CH1;
   [1115] VL3-CL;
   [1116] VL3-CH1-CL;
   [1117] VL3-CL-CH1;
   [1118] VL3-CH1-Fc;
   [1119] VL3-CL-Fc;
   [1120] VL3-CH1-CL-Fc;
   [1121] VL3-CL-CH1-Fc;
   [1122] VL3-L1-Fc;
   [1123] VL3-L1-CH1;
   [1124] VL3-L1-CL;
   [1125] VL3-L1-CH1-L2-CL;
   [1126] VL3-L1-CL-L2-CH1;
   [1127] VL3-L1-CH1-L2-Fc;
   [1128] VL3-L1-CL-L2-Fc;
   [1129] VL3-L1-CH1-L2-CL-Fc; or
   [1130] VL3-L1-CL-L2-CH1-Fc;
   [1131] wherein the third polypeptide has a structure represented by:
   [1132] VH3;
   [1133] VH3-Fc;
   [1134] VH3-CH1;
   [1135] VH3-CL;
   [1136] VH3-CH1-CL;
   [1137] VH3-CL-CH1;
   [1138] VH3-CH1-Fc;
   [1139] VH3-CL-Fc;
   [1140] VH3-CH1-CL-Fc;
   [1141] VH3-CL-CH1-Fc;
   [1142] VH3-L1-Fc;
   [1143] VH3-L1-CH1;
   [1144] VH3-L1-CL;
   [1145] VH3-L1-CH1-L2-CL;
   [1146] VH3-L1-CL-L2-CH1;
   [1147] VH3-L1-CH1-L2-Fc;
   [1148] VH3-L1-CL-L2-Fc;
   [1149] VH3-L1-CH1-L2-CL-Fc; or
   [1150] VH3-L1-CL-L2-CH1-Fc;
   [1151] wherein:
   [1152] VL1 is a first immunoglobulin light chain variable region;
   [1153] VL2 is a second immunoglobulin light chain variable region;
   [1154] VL3 is a third immunoglobulin light chain variable region;
   [1155] VH1 is a first immunoglobulin heavy chain variable region;
   [1156] VH2 is a second immunoglobulin heavy chain variable region;
   [1157] VH3 is a third immunoglobulin heavy chain variable region;
   [1158] Fc is a region comprising an immunoglobulin heavy chain constant region 2 (CH2), an immunoglobulin heavy chain constant region 3 (CH3), and optionally, an immunoglobulin hinge;
   [1159] CH1 is an immunoglobulin heavy chain constant region 1;
   [1160] CL is an immunoglobulin light chain constant region; and
   [1161] L1, L2, L3, L4 and L5 are amino acid linkers.
[1162] 16. The antigen binding polypeptide complex of clause 8, wherein the first polypeptide has a structure represented by:
   [1163] VL1-VL2-VH2-VH1;
   [1164] VH1-VH2-VL2-VL1;
   [1165] VL1-L1-VL2-L2-VH2-L3-VH1;
   [1166] VH1-L1-VH2-L2-VL2-L3-VL1;
   [1167] VL1-VL2-VH2-VH1-Fc;
   [1168] VH1-VH2-VL2-VL1-Fc;
   [1169] VL1-L1-VL2-L2-VH2-L3-VH1-Fc;
   [1170] VH1-L1-VH2-L2-VL2-L3-VL1-Fc;
   [1171] VL1-L1-VL2-L2-VH2-L3-VH1-L4-Fc;
   [1172] VH1-L1-VH2-L2-VL2-L3-VL1-L4-Fc;
   [1173] VL1-VL2-VH2-VH1-CH1;
   [1174] VH1-VH2-VL2-VL1-CH1;
   [1175] VL1-VL2-VH2-VH1-CL;
   [1176] VH1-VH2-VL2-VL1-CL;
   [1177] VL1-VL2-VH2-VH1-CH1-CL;
   [1178] VH1-VH2-VL2-VL1-CH1-CL;
   [1179] VL1-VL2-VH2-VH1-CL-CH1;
   [1180] VH1-VH2-VL2-VL1-CL-CH1;
   [1181] VL1-L1-VL2-L2-VH2-L3-VH1-L4-CH1;
   [1182] VH1-L1-VH2-L2-VL2-L3-VL1-L4-CH1;
   [1183] VL1-L1-VL2-L2-VH2-L3-VH1-L4-CL;
   [1184] VH1-L1-VH2-L2-VL2-L3-VL1-L4-CL;
   [1185] VL1-L1-VL2-L2-VH2-L3-VH1-L4-CH1-L5-CL;
   [1186] VH1-L1-VH2-L2-VL2-L3-VL1-L4-CH1-L5-CL;
   [1187] VL1-L1-VL2-L2-VH2-L3-VH1-L4-CL-L5-CH1;
   [1188] VH1-L1-VH2-L2-VL2-L3-VL1-L4-CL-L5-CH1;
   [1189] VL1-VL2-VH2-VH1-CH1-Fc;
   [1190] VH1-VH2-VL2-VL1-CH1-Fc;
   [1191] VL1-VL2-VH2-VH1-CL-Fc;
   [1192] VH1-VH2-VL2-VL1-CL-Fc;
   [1193] VL1-VL2-VH2-VH1-CH1-CL-Fc;
   [1194] VH1-VH2-VL2-VL1-CH1-CL-Fc;
   [1195] VL1-VL2-VH2-VH1-CL-CH1-Fc;
   [1196] VH1-VH2-VL2-VL1-CL-CH1-Fc;
   [1197] VL1-L1-VL2-L2-VH2-L3-VH1-L4-CH1-Fc;
   [1198] VH1-L1-VH2-L2-VL2-L3-VL1-L4-CH1-Fc;
   [1199] VL1-L1-VL2-L2-VH2-L3-VH1-L4-CL-Fc;
   [1200] VH1-L1-VH2-L2-VL2-L3-VL1-L4-CL-Fc;
   [1201] VL1-L1-VL2-L2-VH2-L3-VH1-L4-CH1-L5-CL-Fc;
   [1202] VH1-L1-VH2-L2-VL2-L3-VL1-L4-CH1-L5-CL-Fc;
   [1203] VL1-L1-VL2-L2-VH2-L3-VH1-L4-CL-L5-CH1-Fc;
   [1204] VH1-L1-VH2-L2-VL2-L3-VL1-L4-CL-L5-CH1-Fc;
   [1205] VL1-L1-VL2-L2-VH2-L3-VH1-L4-CH1-L5-Fc;
   [1206] VH1-L1-VH2-L2-VL2-L3-VL1-L4-CH1-L5-Fc;
   [1207] VL1-L1-VL2-L2-VH2-L3-VH1-L4-CL-L5-Fc;
   [1208] VH1-L1-VH2-L2-VL2-L3-VL1-L4-CL-L5-Fc;
   [1209] VL1-L1-VL2-L2-VH2-L3-VH1-L4-CH1-L5-CL-L6-Fc;
   [1210] VH1-L1-VH2-L2-VL2-L3-VL1-L4-CH1-L5-CL-L6-Fc;
   [1211] VL1-L1-VL2-L2-VH2-L3-VH1-L4-CL-L5-CH1-L6-Fc; or
   [1212] VH1-L1-VH2-L2-VL2-L3-VL1-L4-CL-L5-CH1-L6-Fc;
   [1213] wherein the second polypeptide has a structure represented by:
   [1214] VL3;
   [1215] VL3-Fc;
   [1216] VL3-CH1;
   [1217] VL3-CL;
   [1218] VL3-CH1-CL;
   [1219] VL3-CL-CH1;
   [1220] VL3-CH1-Fc;
   [1221] VL3-CL-Fc;
   [1222] VL3-CH1-CL-Fc;
   [1223] VL3-CL-CH1-Fc;
   [1224] VL3-L7-Fc;
   [1225] VL3-L7-CH1;
   [1226] VL3-L7-CL;
   [1227] VL3-L7-CH1-L8-CL;
   [1228] VL3-L7-CL-L8-CH1;
   [1229] VL3-L7-CH1-L8-Fc;
   [1230] VL3-L7-CL-L8-Fc;
   [1231] VL3-L7-CH1-L8-CL-Fc;
   [1232] VL3-L7-CL-L8-CH1-Fc;
   [1233] VL3-L7-CH1-L8-CL-L9-Fc; or
   [1234] VL3-L7-CL-L8-CH1-L9-Fc;
   [1235] wherein the third polypeptide has a structure represented by:
   [1236] VH3;
   [1237] VH3-Fc;
   [1238] VH3-CH1;
   [1239] VH3-CL;
   [1240] VH3-CH1-CL;
   [1241] VH3-CL-CH1;
   [1242] VH3-CH1-Fc;
   [1243] VH3-CL-Fc;
   [1244] VH3-CH1-CL-Fc;
   [1245] VH3-CL-CH1-Fc;
   [1246] VH3-L10-Fc;
   [1247] VH3-L10-CH1;
   [1248] VH3-L10-CL;
   [1249] VH3-L10-CH1-L11-CL;
   [1250] VH3-L10-CL-L11-CH1;
   [1251] VH3-L10-CH1-L11-Fc;
   [1252] VH3-L10-CL-L1-Fc;
   [1253] VH3-L10-CH1-L11-CL-Fc;
   [1254] VH3-L10-CL-L11-CH1-Fc;
   [1255] VH3-L10-CH1-L11-CL-L12-Fc; or
   [1256] VH3-L10-CL-L11-CH1-L12-Fc;
   [1257] wherein:
   [1258] VL1 is a first immunoglobulin light chain variable region;
   [1259] VL2 is a second immunoglobulin light chain variable region;
   [1260] VL3 is a third immunoglobulin light chain variable region;
   [1261] VH1 is a first immunoglobulin heavy chain variable region;
   [1262] VH2 is a second immunoglobulin heavy chain variable region;
   [1263] VH3 is a third immunoglobulin heavy chain variable region;
   [1264] Fc is a region comprising an immunoglobulin heavy chain constant region 2 (CH2), an immunoglobulin heavy chain constant region 3 (CH3), and optionally, an immunoglobulin hinge;
   [1265] CH1 is an immunoglobulin heavy chain constant region 1;
   [1266] CL is an immunoglobulin light chain constant region; and
   [1267] L1, L2, L3, L4, L5, L6, L7, L8, L9, L10, L11 and L12 are amino acid linkers.
[1268] 17. The antigen binding polypeptide complex of any one of clauses 1-16, wherein VL1, VL2, VL2, VH1, VH2 and/or VH3 specifically binds to at least one epitope on at least one antigen selected from the group consisting of: A2AR, APRIL, ATPDase, BAFF, BAFFR, BCMA, BlyS, BTK, BTLA, B7DC, B7H1, B7H2, B7H3, B7H4, B7H5, B7H6, B7H7, B7RP1, B7-4, C3, C5, CCL2, CCL3, CCL4, CCL5, CCL7, CCL8, CCL11, CCL15, CCL17, CCL19, CCL20, CCL21, CCL25 CCR3, CCR4, CD3, CD19, CD20, CD24, CD27, CD28, CD38, CD39, CD40, CD40L, CD47, CD52, CD70, CD80, CD86, CD123, CD133, CD137, CD137L, CD160, CD272, CEACAM5, CLEC9, CLEC91, CRTH2, CSF-1, CSF-2, CSF-3, CXCL1, CXCL2, CXCL4, CXCL12, CXCL13, CXCR3, cMet, CTLA4, DLL3, DNGR-1, E-cadherin, EGFR, ENTPD1, EpCAM, FCER1, FCER1A, FCER2, FGFR, FLAP, FOLH1, Gi24, GITR, GITRL, GPR5, HER2, HER3, ICOSL, ICOS, HHLA2, HMGB1, HVEM, IDO, IFNa, IgE, IGF1R, IL2Rbeta, ILL, IL1A, IL1B, IL1F10, IL2, IL4, IL4Ra, IL5, IL5R, IL6, IL7, IL7Ra, IL8, IL9, IL9R, IL10, rhIL10, IL12, IL13, IL13Ra1, IL13Ra2, 1L15, IL17, IL17Rb, IL18, IL22, IL23, IL25, IL7, IL33, IL35, ITGB4, ITK, KIR, LAG3, LAMP1, leptin, LPFS2, MHC class II, MUC-1, MUC-16, NCR3LG1, NKG2D, NKp46, NTPDase-1, OX40, OX40L, PD-1, PD-L1, PD-L2, PROM1, S152, SIRPalpha, SISP1, SLC, SPG64, ST2, STEAP1, STEAP2, Syk kinase, STEAP1, TROP2, TACI, TDO, T14, TIGIT, TIM3, TLR, TLR2, TLR4, TLR5, TLR9, TMEF1, TNFa, TNFRSF7, Tp55, TREM1, TSLP, TSLPR, TWEAK, VEGF, VISTA, Vstm3, WUCAM, DLL4, TGFbeta, GP100, GPRC5D, CD30 and CD16A.
[1269] 18. The antigen binding polypeptide complex of clause 17, wherein:
   [1270] (i) VH1 and VL1 specifically bind to CD3, VH2 and VL2 specifically bind to CD28, and VH3 and VL3 specifically bind to CD338
   [1271] (ii) VH1 and VL1 specifically bind to CD3, VH2 and VL2 specifically bind to CD28, and VH3 and VL3 specifically bind to CD19;
   [1272] (iii) VH1 and VL1 specifically bind to CD28, VH2 and VL2 specifically bind to CD3, and VH3 and VL3 specifically bind to CD38;
   [1273] (iv) VH1 and VL1 specifically bind to CD28, VH2 and VL2 specifically bind to CD3, and VH3 and VL3 specifically bind to CD19.
[1274] 19. The antigen binding polypeptide complex of any one of clauses 1-16, which specifically binds to a viral peptide, protein, polypeptide, or a fragment thereof, optionally wherein the VL1, VL2, VL3, VH1, VH2, and/or VH3 specifically binds to at least one epitope on at least one antigen of a viral peptide, protein, polypeptide, or a fragment thereof.
[1275] 20. The antigen binding polypeptide complex of clause 19, wherein the viral peptide, protein, polypeptide, or a fragment is from: influenza virus neuraminidase, influenza virus hemagglutinin, human respiratory syncytial virus (RSV)-viral proteins, RSV F glycoprotein, RSV G glycoprotein, herpes simplex virus (HSV) viral proteins, herpes simplex virus glycoproteins gB, gC, gD, and gE, chlamydia MOMP and PorB antigens, core protein, matrix protein or other protein of Dengue virus, measles virus hemagglutinin, herpes simplex virus type 2 glycoprotein gB, poliovirus 1 VP1, envelope glycoproteins of HIV 1, hepatitis B surface antigen, diptheria toxin, streptococcus 24M epitope, gonococcal pilin, pseudorabies virus g50 (gpD), pseudorabies virus II (gpB), pseudorabies virus Ill (gpC), pseudorabies virus glycoprotein H, pseudorabies virus glycoprotein E, transmissible gastroenteritis glycoprotein 195, transmissible gastroenteritis matrix protein, swine rotavirus glycoprotein 38, swine parvovirus capsid protein, Serpulinahydodysenteriae protective antigen, bovine viral diarrhea glycoprotein 55, Newcastle disease virus hemagglutinin-neuramnmidase, swine flu hemagglutinin, swine flu neuraminidase, foot and mouth disease virus, hog colera virus, swine influenza virus, African swine fever virus, Mycoplasma liyopneutiioniae, infectious bovine rhinotracheitis virus, infectious bovine rhinotracheitis virus glycoprotein E, glycoprotein G, infectious laryngotracheitis virus, infectious laryngotracheitis virus glycoprotein G or glycoprotein I, a glycoprotein of La Crosse virus, neonatal calf diarrhoea virus, Venezuelan equine encephalomyelitis virus, punta toro virus, murine leukemia virus, mouse mammary tumor virus, hepatitis B virus core protein and hepatitis B virus surface antigen or a fragment or derivative thereof, antigen of equine influenza virus or equine herpes virus, including equine influenza virus type A/Alaska 91 neuraminidase, equine influenza virus typeA/Miami 63 neuraminidase, equine influenza virus type A/Kentucky 81 neuramnmidase equine herpes virus type 1 glycoprotein B, and equine herpes virus type 1 glycoprotein D, antigen of bovine respiratory syncytial virus or bovine parainfluenza virus, bovine respiratory syncytial virus attachment protein (BRSV G), bovine respiratory syncytial virus fusion protein (BRSV F), bovine respiratory syncytial virus nucleocapsid protein (BRSVN), bovine parainfluenza virus type 3 fusion protein, bovine parainfluenza virus type 3 hemagglutinin neuraminidase, bovine E viral diarrhoea virus glycoprotein 48 and glycoprotein 53, glycoprotein E of Dengue virus, or glycoprotein E1E2 of human hepatitis C virus.
[1276] 21. The antigen binding polypeptide complex of any one of clauses 1-16, wherein VL1, VL2, VH1 and/or VH2 specifically binds to an HIV protein;
   [1277] optionally wherein VL1, VL2, VL3, VH1, VH2, and/or VH3 specifically binds to an HIV protein.
[1278] 22. The antigen binding polypeptide complex of clause 21, wherein VH1, VH2 and VH3 specifically bind to different HIV proteins or to different epitopes on the same HIV protein; and/or wherein VL1, VL2 and VL3 specifically bind to different HIV proteins or to different epitopes on the same HIV protein.
[1279] 23. The antigen binding polypeptide complex of clause 21 or 22, wherein the HIV protein is an HIV envelope protein, an HIV structural protein, an HIV functional protein, or an HIV accessory protein.
[1280] 24. The antigen binding polypeptide complex of clause 23, wherein the HIV envelope protein is HIV envelope glycoprotein (Env), HIV envelope glycoprotein gp160, HIV envelope surface glycoprotein gp120, or HIV transmembrane envelope protein gp41.
[1281] 25. The antigen binding polypeptide complex of clause 23, wherein the HIV structural protein is p17, p24, p7 or p55.
[1282] 26. The antigen binding polypeptide complex of clause 23, wherein the HIV functional protein is p66, HIV-1 protease (PR) or p31.
[1283] 27. The antigen binding polypeptide complex of clause 23, wherein the HIV accessory protein is Nef, Tat, Rev, Vif, Vpr or Vpu.
[1284] 28. The antigen binding polypeptide complex of any one of clauses 21-27, wherein VH1 is a first immunoglobulin heavy chain variable region that specifically binds to at least one epitope on at least one antigen selected from the group consisting of Env, gp160, gp120, gp41, p17, p24, p7, p55, p66, p31, Nef Tat, Rev, Vif, Vpr and Vpu;
   [1285] VH2 is a second immunoglobulin heavy chain variable region that specifically binds to at least one epitope on at least one antigen selected from the group consisting of Env, gp160, gp120, gp41, p17, p24, p7, p55, p66, HIV-1 protease, p31, Nef, Tat, Rev, Vif, Vpr and Vpu;
   [1286] VH3 is a third immunoglobulin heavy chain variable region that specifically binds to at least one epitope on at least one antigen selected from the group consisting of Env, gp160, gp120, gp41, p17, p24, p7, p55, p66, HIV-1 protease, p31, Net, Tat, Rev, Vif, Vpr and Vpu;
   [1287] VL1 is a first immunoglobulin light chain variable region that specifically binds to at least one epitope on at least one antigen selected from the group consisting of Env, gp160, gp120, gp41, p17, p24, p7, p55, p66, HIV-1 protease, p31, Net. Tat, Rev, Vif, Vpr and Vpu;
   [1288] VL2 is a second immunoglobulin light chain variable region that specifically binds to at least one epitope on at least one antigen selected from the group consisting of Env, gp160, gp120, gp41, p17, p24, p7, p55, p66, HIV-1 protease, p31, Net, Tat, Rev, Vif, Vpr and Vpu; and/or
   [1289] VL3 is a third immunoglobulin light chain variable region that specifically binds to at least one epitope on at least one antigen selected from the group consisting of Env, gp160, gp120, gp41, p17, p24, p7, p55, p66, HIV-1 protease, p31, Nef, Tat, Rev, Vif, Vpr and Vpu.
[1290] 29. The antigen binding polypeptide complex of any one of clauses 21-28, wherein one or more of VH1, VH2 and VH3 comprises an amino acid sequence having at least 90% identity to any one of SEQ ID NOs:327-330; optionally wherein one or more of VH1, VH2 and VH3 comprises an amino acid sequence having at least at least 95% identity or 100% identity to any one of SEQ ID NOs:327-330.
[1291] 30. The antigen binding polypeptide complex of any one of clauses 21-29, wherein one or more of VL1, VL2 and VL3 comprises an amino acid sequence having at least 90% identity to any one of SEQ ID NOs:331-334; optionally wherein one or more of VL1, VL2 and VL3 comprises an amino acid sequence having at least 95% identity or 100% identity to any one of SEQ ID NOs:331-334.
[1292] 31. The antigen binding polypeptide complex of any one of clauses 1-30, wherein the immunoglobulin hinge comprises an upper hinge region, a middle hinge region, a lower hinge region, or a combination thereof.
[1293] 32. The antigen binding polypeptide complex of any one of clauses 1-31, wherein linkers L1, L2, L3, L4, L5, L6, L7, L8, L9, L10, L11 and/or L12 have a length of from about 1 amino acid to about 50 amino acids.
[1294] 33. The antigen binding polypeptide complex of any one of clauses 1-32, wherein linkers L1, L2, L3, L4, L5, L6, L7, L8, L9, L10, L11 and/or L12 comprise the amino acid sequence of g, a, gss, asg, ggssg, gssgs, gtvaa, asggs, astgg, asggsg, ggsggssgss, sggsgssggs, ggsggsgsgggsasgsg, ggsggsgsggggsasgsg, gggssggggsggsgsggsgs, ggggsggsgsggggsasgsg, gggssggsgsggsgsggsgs, sggssggsgsggsgsggsgssg, gsgssggggsggsgsggsgssg, ggggsgsggsgggssggggsggggsggggsggggsggggs, ggggsggggsggggsggggsggggsggggsggggsggggs, ggggsgsggsgggssggggsggggsggggsggggsggggssss, ggggsgsggsgggssggggsggggsggggsggggsggggssssgs, ggsgg, gsggsagsgsggggsasgsg, ggggs, or gsggsggsgsggggsasgsg (SEQ ID NOs:1-19 and 665-672), or a sequence having at least 50%, at least 60%, at least 70%, at least 80%, at least 90%, or at least 95% identity to any one of SEQ ID NOs:1-19 and 665-672.
[1295] 34. The antigen binding polypeptide complex of any one of clauses 1-33, wherein the amino acid linkers are non-immunogenic.
[1296] 35. The antigen binding polypeptide complex of any one of clauses 1-34, wherein the amino acid linkers do not contain a consensus T cell epitope.
[1297] 36. The antigen binding polypeptide complex of any one of clauses 1-35, wherein the Fc region comprises at least one knob-into-hole modification.
[1298] 37. The antigen binding polypeptide complex of clause 36, wherein the antigen binding polypeptide complex is an IgG1 or IgG4 antibody and the knob-into-hole modification comprises:
   [1299] (i) knob substitutions of S354C and T366W and hole substitutions of Y349C, T366S, L368A and Y407V;
   [1300] (ii) hole substitutions of L234A, L235A and P239A;
   [1301] (iii) hole substitutions of L234A and L235A;
   [1302] (iv) hole substitutions of M428L and N433S;
   [1303] (v) hole substitutions of M252Y, S254T and T256E; or
   [1304] (vi) a combination thereof;
   [1305] based on the EU numbering scheme.
[1306] 38. The antigen binding polypeptide complex of any one of clauses 1-37, wherein the antigen binding polypeptide complex further comprises a detectable label.
[1307] 39. The antigen binding polypeptide complex of clause 38, wherein the detectable label selected from the group consisting of a radioactive label, chemiluminescent label, fluorescent label, enzyme, or a combination thereof.
[1308] 40. The antigen binding polypeptide complex of any one of clauses 1-39, wherein the antigen binding polypeptide complex is conjugated to an agent to form an antibody-agent conjugate.
[1309] 41. The antigen binding polypeptide complex of clause 40, wherein the antibody-agent conjugate is selected from the group consisting of a cytotoxic agent, an immunomodulating agent, an imaging agent, a therapeutic protein, or a combination thereof.
[1310] 42. The antigen binding polypeptide complex of any one of clauses 1-41, wherein the antigen binding polypeptide complex further comprises a tag for purification, separation, and/or detection.
[1311] 43. The antigen binding polypeptide complex of clause 42, wherein the tag is a polyhistidine tag, polyarginine tag, glutathione-S-transferase (GST), maltose binding protein (MBP), chitin binding protein (CBP), Strep-tag, thioredoxin (TRX), poly(NANP), FLAG tag, ALFA-tag, V5-tag, Myc-tag, hemagglutinin (HA) tag, Spot tag, T7 tag, NE tag, or green fluorescence protein (GFP), or a combination thereof.
[1312] 44. The antigen binding polypeptide complex of clause 43, wherein the polyhistidine tag consists of from about 4 to about 10 histidine residues.
[1313] 45. The antigen binding polypeptide complex of clause 43 or clause 44, wherein the polyhistidine tag consists of about 8 histidine residues.
[1314] 46. The antigen binding polypeptide complex of any one of clauses 42-45, wherein the tag is located at the N-terminus of the antigen binding polypeptide.
[1315] 47. The antigen binding polypeptide complex of any one of clauses 42-45, wherein the tag is located at the C-terminus of the antigen binding polypeptide.
[1316] 48. The antigen binding polypeptide complex of any one of clauses 1-47 that binds to an antigen with an equilibrium dissociation constant (KD) of from about 10 μM to about 1 μM.
[1317] 49. The antigen binding polypeptide complex of any one of clauses 1-48, further comprising an effector function mutation.
[1318] 50. An antibody or antigen binding fragment thereof comprising an antigen binding polypeptide as defined in any one of clauses 1-49 or the antigen binding polypeptide complex of any one of clauses 1-49.
[1319] 51. The antibody or antigen binding fragment thereof of clause 50, wherein the antibody is IgG, IgM, IgE, IgA or IgD.
[1320] 52. The antibody or antigen binding fragment thereof of clause 51, wherein the IgG is IgG1, IgG2, IgG3 or IgG4.
[1321] 53. The antibody or antigen binding fragment thereof of clause 50, wherein the antigen binding fragment is a Fab, scFab, Fab′, F(ab′)2, Fv, or scFv.
[1322] 54. The antibody or antigen binding fragment thereof of clause 50, wherein the antibody is human or humanized.
[1323] 55. A polypeptide having at least 90% identity, at least 95% identity, or 100% identity to any one of SEQ ID NOs:78-92.
[1324] 56. A polypeptide encoded by a polynucleotide having at least 90% identity, at least 95% identity, or 100% identity to any one of SEQ ID NOs:93-107.
[1325] 57. A polynucleotide encoding an antigen binding polypeptide as defined in any one of clauses 1-49, the antigen binding polypeptide complex of any one of clauses 1-49 or the antibody or antigen binding fragment of any one of clauses 50-54.
[1326] 58. The polynucleotide of clause 57, wherein the polynucleotide has at least 90% identity, at least 95% identity, or 100% identity to any one of SEQ ID NOs:93-107, optionally wherein the polynucleotide has at least 95% identity, or 100% identity to any one of SEQ ID NOs:93-107.
[1327] 59. The polynucleotide of clause 57 or clause 58, wherein the polynucleotide encodes a polypeptide having at least 90% identity, at least 95% identity, or 100% identity to any one of SEQ ID NOs:78-92.
[1328] 60. A vector comprising the polynucleotide of any one of clauses 57-59.
[1329] 61. A host cell comprising the polynucleotide of any one of clauses 57-59 or the vector of clause 60.
[1330] 62. A chimeric antigen receptor (CAR) comprising an antigen binding polypeptide as defined in any one of clauses 1-49 or the antigen binding polypeptide complex of any one of clauses 1-49.
[1331] 63. An immune cell comprising the CAR of clause 62.
[1332] 64. A pharmaceutical composition comprising (i) an antigen binding polypeptide as defined in any one of clauses 1-49 or the antigen binding polypeptide complex of any one of clauses 1-49, the antibody or antigen binding fragment of any one of clauses 50-54, the polypeptide of clause 55 or clause 56, the polynucleotide of any one of clauses 57-59, the vector of clause 60, the host cell of clause 61, the CAR of clause 62, the immune cell of clause 63, or a combination thereof, and (ii) a pharmaceutically acceptable carrier.
[1333] 65. A kit comprising an antigen binding polypeptide as defined in any one of clauses 1-49 or the antigen binding polypeptide complex of any one of clauses 1-49, the antibody or antigen binding fragment thereof of any one of clauses 50-54, the polypeptide of clause 55 or clause 56, the polynucleotide of any one of clauses 57-59, the vector of clause 60, the host cell of clause 61, the CAR of clause 62, the immune cell of clause 63, the pharmaceutical composition of clause 64, or a combination thereof.
[1334] 66. An antigen binding polypeptide as defined in any one of clauses 1-49, an antigen binding polypeptide complex according to any one of clauses 1-49, an antibody or antigen binding fragment according to any one of clauses 50-54, a polypeptide according to clause 55 or clause 56, a polynucleotide according to any one of clauses 57-59, a vector according to clause 60, a host cell according to clause 61, a CAR according to clause 62, an immune cell according to clause 63, a pharmaceutical composition according to clause 64, or a combination thereof, for use in treating or preventing a disease in a subject in need thereof.
[1335] 67. The antigen binding polypeptide, antigen binding polypeptide complex, antibody or antigen binding fragment, polypeptide, polynucleotide, vector, host cell, CAR, immune cell or pharmaceutical composition for use according to clause 66, wherein the disease is human immunodeficiency virus (HIV) infection, acquired immune deficiency syndrome (AIDS), AIDS-related complex (ARC), or HIV-related opportunistic infection, optionally wherein the antigen binding polypeptide or antigen binding polypeptide complex is as defined in any one of clauses 21-30.
[1336] 68. The antigen binding polypeptide, antigen binding polypeptide complex, antibody or antigen binding fragment, polypeptide, polynucleotide, vector, host cell, CAR, immune cell or pharmaceutical composition for use according to clause 67, wherein the HIV is HIV-1.
[1337] 69. The antigen binding polypeptide, antigen binding polypeptide complex, antibody or antigen binding fragment, polypeptide, polynucleotide, vector, host cell, CAR, immune cell or pharmaceutical composition for use according to clause 66, wherein the disease is cancer, optionally wherein the antigen binding polypeptide or antigen binding polypeptide complex is as defined in clause 17 or clause 18.
[1338] 70. An antigen binding polypeptide as defined in any one of clauses 1-49, an antigen binding polypeptide complex according to any one of clauses 1-49, an antibody or antigen binding fragment according to any one of clauses 50-54, a polypeptide according to clause 55 or clause 56, a polynucleotide according to any one of clauses 57-59, a vector according to clause 60, a host cell according to clause 61, a CAR according to clause 62, an immune cell according to clause 63, a pharmaceutical composition according to clause 64, or a combination thereof, for use in treating or preventing virus infection in a subject, optionally wherein the virus is influenza virus, respiratory syncytial virus (RSV), chlamydia, adenovirdiae, mastadeno virus, aviadenovirus, herpesviridae, herpes simplex virus 1, herpes simplex virus 2, herpes simplex virus 5, herpes simplex virus 6, leviviridae, levivirus, enterobacteria phase MS2, allolevirus, poxviridae, chordopoxvirinae, parapoxvirus, avipoxvirus, capripoxvirus, leporiipoxvirus, suipoxvirus, molluscipoxvirus, entomopoxvirinae, papovaviridae, polyomavirus, papillomavirus, paramyxoviridae, paramyxovirus, parainfluenza virus 1, mobillivirus, measles virus, rubulavirus, mumps virus, pneumonovirinae, pneumovirus, me tapneumo virus, avian pneumovirus, human metapneumovirus, picornaviridae, enterovirus, rhinovirus, hepatovirus, human hepatitis A virus, cardiovirus, andaptho virus, reoviridae, orthoreovirus, orbivirus, rotavirus, cypovirus, fijivirus, phytoreovirus, oryzavirus, retroviridae, mammalian type B retroviruses, mammalian type C retroviruses, avian type C retroviruses, type D retrovirus group, BLV-HTLV retroviruses, lentivirus, human immunodeficiency virus 1, human immunodeficiency virus 2, HTLV-I and -II viruses, SARS coronavirus, herpes simplex E virus, Epstein Barr virus, cytomegalovirus, hepatitis virus (HCV, HAV, HBV, HDV, HEV), Toxoplasma gondii virus, Treponema pallidium virus, human T-lymphotrophic virus, encephalitis virus, West Nile virus, Dengue virus, Varicella Zoster Virus, rubeola, mumps, rubella, spumavirus, flaviviridae, hepatitis C virus, hepadnaviridae, hepatitis B virus, togaviridae, alphavirus sindbis virus, rubivirus, rubella virus, rhabdoviridae, vesiculovirus, lyssavirus, ephemerovirus, cytorhabdo virus, necleorhabdo virus, arenaviridae, arenavirus, lymphocytic choriomeningitis virus, Ippy virus, lassa virus, coronaviridae, coronavirus, or torovirus; and/or wherein the antigen binding polypeptide or antigen binding polypeptide complex is as defined in clause 19 or clause 20.

### EXAMPLES

[1339] The following examples are provided to further illustrate aspects of the disclosure, and are not meant to constrain the disclosure to any particular application or theory of operation.

### Example 1

### Design of Trispecific Antibody Constructs

[1340] Non-limiting examples of trispecific antibody configurations are shown in FIGS. 1A-IE. Antibody heavy chain variable domain (VH) and light chain variable domain (VL) sequences targeting human CD3, CD28, CD38 and CD19 were selected from publicly available databases (e.g., GenBank) or patents to illustrate the feasibility of constructing various formats of trispecific antibodies. Linkers in various length and sequence connecting VH and VL regions in different orders and orientations were tested, with and without different motifs of the constant domains (e.g., CL, CH1, CH2, CH3). “Knob” and “hole” mutations were integrated into respective halves of the antibody Fc region when Fc heterodimerization was needed. Effector function or half-life extension mutations can also be incorporated into the Fc sequences when needed. Once the amino acid sequences for each trispecific antibody molecule were assembled, DNA encoding these sequences were codon optimized, synthesized (Cambridge Biologics, LLC, Brookline, Mass.), and cloned into a eukaryotic expression vector.

### Example 2

### Trispecific Antibody Expression and Purification

[1341] Trispecific antibodies were produced by transient transfection of expression plasmids into Expi293F cells at density of 2.5-3.0×10⁶/ml using polyethylenimine (PEI; Polyscience). Plasmid DNA and PEI were diluted in OPTi-MEM (LifeTech) separately and mixed later. The plasmid/PEI mixture, at a ratio of 1:3 (w:w), was added to the cell culture 10 minutes after mixing. Valproic acid and sodium propionate were added to final concentrations of 0.5 mM and 5 mM, respectively, 16-20 hours post transfection. Supernatant was harvested 5 days post transfection, and filtered through a 0.45 um filter. Trispecific antibodies were then purified first by affinity chromatography using Protein A resins in batch mode according to manufacturer's standard procedures. After antibodies were eluted using IgG elusion buffer (Thermo Fischer Scientific) from protein A, they were dialyzed into 10 mM Histidine (pH6.0)+25 mM NaCl overnight. Antibodies were further purified by size exclusion chromatography using Hiload 16/600 Superdex 200 PG or Superdex 200 Increase 10/300 GL (Cytiva Lifesciences). Fractions with the correct elusion profile were collected and concentrated for further characterization.

### Example 3

### Trispecific Antibody ELISA Binding Analysis

[1342] An ELISA binding assay was used to test binding of trispecific antibodies to their target antigens. Target protein for each binding site of the trispecific antibodies was coated in the wells of 96-well Immuno Plates (Thermo Fisher Scientific) overnight at 4° C. Coated plates were blocked using 5% skim milk+2% bovine serum albumin (BSA) in phosphate buffered saline (PBS)+0.25% Tween for one hour at room temperature, then washed three times with PBS+0.25% Tween 20. Serial diluted trispecific antibodies and control molecules were added to the plates and incubated at room temperature for 1 hr. Plates were washed three times with PBS+0.25% Tween 20, incubated with horseradish peroxidase (HPR) conjugated detection antibody for one hour at room temperature, washed again, and then developed with Peroxidase Substrate (KPL, Gaithersburg, Md., USA). After the reaction was terminated by adding 100 μl of KPL TMB BlueSTOP solution, plates were read at OD₆₅₀ using a plate reader and data analyzed in GraphPad Prism.

[1343] FIGS. 2A-2C show ELISA results of trispecific aCD28aCD3/aCD38scFv, aCD28aCD3/aCD38Fab, aCD28aCD3/aCD38scFab, aCD28aCD3/aCD38CLCH1, or isotype control (Control IgG) binding to CD3 (FIG. 2A), CD28 (FIG. 2B), and CD38 (FIG. 2C).

[1344] FIGS. 5A-5D show ELISA results of trispecific aCD28aCD3CL1CH1/aCD38scFvCL, aCD28aCD3CL1CH1/aCD19scFvCL or isotype control (Control IgG) binding to CD3 (A), CD28 (B), CD19 (C), and CD38 (D).

### Example 4

### T Cell Activation Assay

[1345] T cell activation by trispecific antibodies was tested using an in vitro T cell activation assay. Purified human peripheral blood mononuclear cells (PBMCs, Blood Research Component, Brookline, Mass., USA) were resuspended in culture medium (RPMI1640 with 10% fetal bovine serum (FBS) and supplemented with Penicillin Streptomycin) (Gibco) (2.5×10⁵ cells/nil). Serial diluted trispecific and control antibodies were first coated onto 96-well flat-bottom culture plates by incubating 2-4 hours in a 37° C. tissue culture incubator. PBMCs (200 μL) were then added to each well containing the antibodies and incubated for 16-24 hours in a 37° C. tissue culture incubator. The cells were centrifuged, stained with fluorescent labeled antibodies for T cell markers, such as CD3, CD4, CD8, activation marker CD69, and analyzed by an Attune flow cytometer (Thermo Fisher Scientific, USA). Data were analyzed using FlowJo software.

[1346] FIG. 3 shows the activation (CD69+) by trispecific antibodies aCD28aCD3L1/aCD38scFv, aCD3aCD28/aCD38scFv, aCD28aCD3/aCD38scFab, aCD3aCD28/aCD38scFab, PMA/IO positive or negative isotype (Control IgG) control, of CD2+ T cells from three different donors.

### Example 5

### In Vitro Cytolytic Assay

[1347] Cytolysis of lymphoma tumor cells Z-138 by T cells mediated by trispecific antibodies was determined using an in vitro cytolytic assay. PBMCs were isolated from normal human donors by Ficoll separation. Target lymphoma cancer cells Z-138 were labeled with the membrane dye PKH-26 (Sigma-Aldrich) and co-cultured for 16 h in a 37° C. tissue culture incubator with human PBMCs as effector cells at an effector-to-target (E:T) ratio of 10:1. Titrations of trispecific antibodies were added to the cells at the start of the incubation. After the incubation cells were spun down and then stained with Fixable Viability dye (Invitrogen). Cells were washed and then run on an Attune flow cytometer (Thermo Fisher Scientific, USA), followed by analysis using the FlowJo software. The percentage of killing is calculated by gating on PKH-26+ tumor cells and determining percentage of dying cells that stain positive for Fixable Viability dye.

[1348] FIGS. 4A-4C show cytolysis of lymphoma tumor cells by T cells mediated by trispecific antibodies aCD28aCD3L1/aCD38scFv, aCD3aCD28/aCD38scFv, aCD28aCD3/aCD38scFab, aCD3aCD28/aCD38scFab, PMA/IO or isotype (Control IgG) control from three different donors (FIGS. 4A-4C, respectively).

### Example 6

### Design of Bispecific and Tetraspecific Antibody Constructs

[1349] Non-limiting examples of bispecific and tetraspecific antibody configurations are shown in FIGS. 6A-6F, FIG. 13A-13C and FIGS. 21A-21D. Such examples include, but are not limited to, an antigen binding polypeptide complex comprising a first polypeptide and a second polypeptide, each comprising an amino acid sequence of any one of SEQ ID NOs:132-170.

[1350] Antibody heavy chain variable domain (VH) and light chain variable domain (VL) sequences targeting human CD3, CD28, CD38, CD19 and Her2 were selected from publicly available databases (e.g., GenBank) or patents to illustrate the feasibility of constructing exemplary bispecific and tetraspecific antibodies of the invention. Linkers of various length and sequence connecting VH and VL regions in different orders and orientations were tested, with and without different motifs of constant domains (e.g., CL, CH1, CH2, CH3). “Knob” and “hole” substitutions were integrated into respective halves of the antibody Fc region when Fc heterodimerization was needed. Effector function or half-life extension mutations can also be incorporated into Fc regions when needed. Once the amino acid sequences for each bispecific or tetraspecific antibody molecule were assembled, DNA encoding these sequences were codon optimized, synthesized (Cambridge Biologics, LLC, Brookline, Mass.), and cloned into a eukaryotic expression vector.

### Example 7

### Antibody Expression and Purification

[1351] Bispecific and tetraspecific antibodies were produced by transient transfection of 1 or 2 expression plasmids into Expi293F cells at a density of 2.5-3.0×10⁶/ml using polyethylenimine (PEI; Polyscience). Plasmid DNA and PEI were diluted in OPTi-MEM (LifeTech) separately and mixed later. The plasmid/PEI mixture, at a ratio of 1:3 (w:w), was added to the cell culture 10 minutes after mixing. Valproic acid and sodium propionate were added to final concentrations of 0.5 mM and 5 mM, respectively, 16-20 hours post transfection. Supernatant was harvested 5 days post transfection, and filtered through a 0.45 um filter. Bispecific and tetraspecific antibodies were then purified first by affinity chromatography using either nickel-charged affinity resin (Ni-NTA, if His-tagged) or Protein A (if contained Fc) in batch mode according to the manufacture's standard procedures. After antibodies were eluted by either 500 mM imidazole (if His-tagged) from Ni-NTA, or using IgG elusion buffer (Thermo Fischer Scientific) from protein A, they were dialyzed into 10 mM Histidine (pH6.0)+25 mM NaCl overnight. Antibodies were further purified by size exclusion chromatography using Hiload 16/600 Superdex 200 PG or Superdex 200 Increase 10/300 GL (Cytiva Lifesciences). Fractions with the correct elusion profile were collected and concentrated for further characterization by SDS-PAGE.

[1352] FIG. 7 shows SDS-PAGE results of Ni-NTA purified bispecific molecules with histidine tags, as depicted in FIG. 6A.

[1353] FIG. 9 shows SDS-PAGE results of protein A purified bispecific, tetravalent molecules with LALAPA Fc, as depicted in FIG. 6B.

### Example 8

### ELISA Binding Assay

[1354] An ELISA binding assay was used to test binding of bispecific and tetraspecific antibodies to their target antigens. Target protein for each binding site of bispecific and tetraspecific antibodies was coated in the wells of 96-well Immuno Plates (Thermo Fisher Scientific) overnight at 4° C. Coated plates were blocked using 5% skim milk+2% bovine serum albumin (BSA) in phosphate buffered saline (PBS)+0.25% Tween for one hour at room temperature, then washed three times with PBS+0.25% Tween 20. Serial diluted antibodies and control molecules were added to the plate and incubated at room temperature for 1 hr. Plates were washed three times with PBS+0.25% Tween 20, incubated with horseradish peroxidase (HPR) conjugated detection antibody for one hour at room temperature, washed again, and then developed with Peroxidase Substrate (KPL, Gaithersburg, Md., USA). After the reaction was terminated by adding 100 μl of KPL TMB BlueSTOP solution, plates were read at OD₆₅₀ using a plate reader and data analyzed in GraphPad Prism.

[1355] FIGS. 8A-8B show ELISA results of bispecific molecule aCD19aCD38-His or isotype control (Control IgG) binding to CD19 (FIG. 8A) and CD38 (FIG. 8B).

[1356] FIGS. 10A-10B show ELISA results of bispecific, tetravalent aCD28aCD3LALAPAFc, aCD3aCD28LALAPAFc, or isotype control (Control IgG) binding to CD3 (FIG. 10A) and CD28 (FIG. 10B).

[1357] FIGS. 12A-12B show ELISA results of bispecific aCD28aCD3LALAPAFc or aCD3aCD28LALAPAFc, or isotype control (Control IgG) binding to CD3 (FIG. 12A) and CD28 (FIG. 12B).

[1358] FIGS. 14A-14D show ELISA results of tetraspecific aCD28aCD3CD19CD38LALAPAFc, aCD3aCD28CD19CD38LALAPAFc, aCD28aCD3CD19CD38LALAPAFc, or aCD28aCD3CD38CD19LALAPAFc, or isotype control (Control IgG) binding to CD3 (FIG. 14A), CD28 (FIG. 14B), CD19 (FIG. 14C), and CD38 (FIG. 14D).

[1359] FIG. 17 shows both orientation and linker can affect expression of tetraspecific molecules.

[1360] FIGS. 18A-18D show ELISA results of tetraspecific aCD28aCD3CD19CD38LALAPAFc with different linker lengths as depicted in FIG. 17, or isotype control (Control IgG) binding to CD3 (FIG. 18A), CD28 (FIG. 18B), CD19 (FIG. 18C), and CD38 (FIG. 18D).

[1361] FIGS. 19A-19D show ELISA results of tetraspecific aCD28aCD3CH1/CD19CD38CL LALAPAFc with different linkers as depicted in FIG. 17, or isotype control (Control IgG) binding to CD3 (FIG. 19A), CD28 (FIG. 19B), CD38 (FIG. 19C), and CD19 (FIG. 19D).

[1362] FIGS. 20A-20D show ELISA results of tetraspecific aCD28aCD3CD38CD19LALAPAFc, aCD28aCD3CD38CD19LALAPAFc, aCD28aCD3CD38CD19LALAPAFc, or aCD3aCD28CD19CD38LALAPAFc, or isotype control (Control IgG) binding to CD3 (FIG. 20A), CD28 (FIG. 20B), CD38 (FIG. 20C), and CD19 (FIG. 20D).

[1363] FIGS. 20E-20H show ELISA results of tetraspecific aCD28aCD3L1/aCD38aCD19L1_HHLL, aCD28aCD3L1/aCD19aCD38L1_HHLL, aCD3aCD28L1/aCD38aCD19L1_HHLL, aCD3aCD28L1/aCD19aCD38L1_HHLL, or isotype control (Control HuIgG) binding to CD3 (FIG. 20E), CD28 (FIG. 20F), CD38 (FIG. 20G), and CD19 (FIG. 20H).

### Example 9

### T Cell Activation Assay

[1364] T cell activation by bispecific and tetraspecific antibodies was tested using an in vitro T cell activation assay. Purified human peripheral blood mononuclear cells (PBMCs, Blood Research Component, Brookline, Mass., USA) were resuspended in culture medium (RPMI1640 with 10% FBS and supplemented with Penicillin Streptomycin)(Gibco) (2.5×10⁵ cells/ml). Serial diluted bispecific, tetraspecific and control antibodies were first coated onto 96-well flat-bottom culture plates by incubating 2-4 hours in a 37° C. tissue culture incubator. PBMCs (200 μL) were then added to each well containing the antibodies and incubated for 16-24 hours in a 37° C. tissue culture incubator. The cells were centrifuged, stained with fluorescent labeled antibodies for T cell markers, such as CD3, CD4, CD8, activation marker CD69, and analyzed by an Attune flow cytometer (Thermo Fisher Scientific, USA). Data were analyzed using FlowJo software.

[1365] FIGS. 16A-16B show activation (CD69+) by tetraspecific molecules aCD28aCD3/aCD19CD38L1LALAPAFc or aCD3aCD28/CD19CD38L1LALAPAFc, or anti-CD3 mAb, of CD4+ (FIG. 16A) or CD8+(FIG. 16B) T cells from three different donors.

### Example 10

### NFkB Luciferase Reporter Assay

[1366] The function of bispecific and tetraspecific antibody constructs was further analyzed using a nuclear factor kappa B (NFkB) luciferase reporter assay. For this assay, Luciferase Reporter Jurkat Stable Cell Line (Signosis, CA, USA) and Jurkat-Lucia™ NFAT Cells (InvivoGen, CA, USA) were prepared according to manufacturer's protocol. Briefly, cells were thawed for 2 min in a 37° C. water bath and gently transferred to a 15 mL conical centrifuge tube containing 10 mL pre-warmed R10 media. Cells were pelleted at 300 g for 5 min at room temperature. After removing the supernatant, cells were resuspended in 20 ml, pre-warmed culture media and transferred to a 75 cm² culture flask, followed by incubation in a mammalian tissue culture incubator until cells were growing and stable (˜3-4 days). Cells were maintained in culture media+selective antibiotics and normally used 7 days after thawing.

[1367] For antibody stimulation, bispecific, tetraspecific or control antibodies were serially diluted in PBS and coated onto 96-well flat-bottom culture plates by incubating 2-4 hours in a 37° C. tissue culture incubator. NFkB Luciferase Reporter Jurkat Stable Cells were resuspended to 2×10⁶ cells/mL, with 100 μl of cells added to each well containing the antibodies and incubated in a mammalian incubator for 24 hours. Assay plates were then taken out and allowed to equilibrate to ambient temperature (10-15 min). Bio-Glo™ Reagent (Promega Cat #G7941) (ambient temperature) was added at 50 μl for each well of the assay plate. After 5 minutes, luminescence activity was measured using Varioskan microplate reader (Thermo Fisher). Data were plotted using GraphPad Prism software. Jurkat-Lucia™ NFAT Cells were resuspended to 7.5×10⁵ cells/mL, with 200 μl of cells added to each well containing the antibodies and incubated in a mammalian incubator for 24 hours. 20 μL of the cell culture supernatant was pipetted into a new 96-well white-walled microtiter plate. 50 μL of Quanti-Luc solution (InvivoGen) was then added to each well before luminescence activity was measured using Varioskan microplate reader (Thermo Fisher). Data were plotted using GraphPad Prism software.

[1368] FIG. 11 shows NFκB pathway activation by bispecific, tetravalent aCD28aCD3L1LALAPAFc or aCD3aCD28L1LALAPAFc.

[1369] FIG. 15 shows NFκB pathway activation by tetraspecific aCD28aCD3/aCD19CD38L1LALAPAFc or aCD3aCD28/CD19CD38L1LALAPAFc.

### Example 11

### Design of Trispecific Antibody Constructs

[1370] Non-limiting examples of multispecific antibody configurations are shown in FIGS. 22 and 24. Such examples include, but are not limited to, an antigen binding polypeptide complex comprising a first polypeptide comprising an amino acid sequence of any one of SEQ ID NOs:171-184 and a second polypeptide comprising an amino acid sequence of any one of SEQ ID NOs:185-187.

[1371] Antibody heavy chain variable domains (VH) and light chain variable domains (VL) targeting human CD3, CD19, CD20, CD28 and CD38 were selected from publicly available databases (e.g., GenBank) or patents to illustrate the feasibility of constructing various formats of trispecific antibodies. Linkers in various length and sequence connecting VH and VL regions in different orders and orientations were tested, with and without different motifs of the constant domains (e.g., CL, CH1, CH2, CH3). “Knob” and “hole” mutations were integrated into respective halves of the antibody Fc region when Fc heterodimerization was needed. Effector function or half-life extension mutations can also be incorporated into the Fc sequences when needed. Once the amino acid sequences for each multispecific antibody molecule were assembled, DNA encoding these sequences was codon optimized, synthesized (Cambridge Biologics, LLC, Brookline, Mass.), and cloned into a eukaryotic expression vector.

### Example 12

### Multispecific Antibody Expression and Purification

[1372] Multispecific antibodies were produced by transient transfection of expression plasmids into Expi293F cells at density of 2.5-3.0×10⁶/ml using polyethylenimine (PEI; Polyscience). Plasmid DNA and PEI were diluted in OPTi-MEM (LifeTech) separately and mixed later. The plasmid/PEI mixture, at a ratio of 1:3 (w:w), was added to the cell culture 10 minutes after mixing. Valproic acid and sodium propionate were added to final concentrations of 0.5 mM and 5 mM, respectively, 16-20 hours post transfection. Supernatant was harvested 5 days post transfection, and filtered through a 0.45 um filter. Multispecific antibodies were then purified first by affinity chromatography using Protein A resins in batch mode according to the manufacture's standard procedures. After antibodies were eluted using IgG elusion buffer (Thermo Fischer Scientific) from protein A, they were dialyzed into 10 mM Histidine (pH6.0)+25 mM NaCl overnight. Antibodies were further purified by size exclusion chromatography using Hiload 16/600 Superdex 200 PG or Superdex 200 Increase 10/300 GL (Cytiva Lifesciences). Fractions with the correct elusion profile were collected and concentrated for further characterization.

### Example 13

### Multispecific Antibody ELISA Binding Analysis

[1373] An ELISA binding assay was used to test binding of multispecific antibodies to their target antigens. Target protein for each binding site of the multispecific antibodies was coated in the wells of 96-well Immuno Plates (Thermo Fisher Scientific) overnight at 4° C. Coated plates were blocked using 5% skim milk+2% bovine serum albumin (BSA) in phosphate buffered saline (PBS)+0.25% Tween for one hour at room temperature, then washed three times with PBS+0.25% Tween 20. Serial diluted multispecific antibodies and control molecules were added to the plate and incubated at room temperature for 1 hr. Plates were washed three times with PBS+0.25% Tween 20, incubated with horseradish peroxidase (HPR) conjugated detection antibody for one hour at room temperature, washed again, and then developed with Peroxidase Substrate (KPL, Gaithersburg, Md., USA). After the reaction was terminated by adding 100 μl of KPL TMB BlueSTOP solution, the plate was read at OD₆₅₀ using a plate reader and data analyzed in GraphPad Prism.

[1374] FIGS. 23A-23D show ELISA results of tetraspecific aCD28aCD3LHaCD38/aCD19scFv, aCD28aCD3HLaCD38/aCD19scFv, or isotype control (Control IgG) binding to CD3 (FIG. 23A), CD28 (FIG. 23B), CD38 (FIG. 23C), and CD19 (FIG. 23D).

[1375] FIGS. 25A-25D show ELISA results of tetraspecific aCD28aCD3LHaCD38/aCD19aCD20, aCD28aCD3LHaCD38/aCD20aCD19, aCD28aCD3HLaCD38/aCD19aCD20, aCD28aCD3HLaCD38/aCD20aCD19, or isotype control (Control IgG) binding to CD3 (FIG. 25A), CD28 (FIG. 25B), CD38 (FIG. 25C), and CD19 (FIG. 25D).

### Example 14

### Design of Additional Antibody Constructs

[1376] Non-limiting examples of additional antibody configurations are shown in FIG. 26. Such examples include, but are not limited to, an antigen binding polypeptide complex comprising a first polypeptide comprising an amino acid sequence of any one of SEQ ID NOs:188-199, and a second polypeptide comprising an amino acid sequence of any one of SEQ ID NOs:188-199.

### Example 15

### Design of Masked Multispecific Molecules

[1377] Non-limiting examples of masked tetraspecific antibody configurations are shown in FIGS. 27, 28 and 33. Such examples include, but are not limited to, an antigen binding polypeptide complex comprising two or three polypeptides, each having the sequence of any one of SEQ ID NOs:200-315. In FIG. 27, variable domains (Fv) of the antibody are shown as heavy chain/light chain pairs, with Fv1-Fv3 targeting tumor associated antigens (TAAs) or immune costimulatory receptors, and a fourth Fv targeting CD3 (aCD3 or aCD3). In some aspects, linkers between Fv3 and aCD3 contain one or more protease recognition sites. In some aspects, three of the Fvs target human Trop2 (aTROP2), cMet (acMET), and CD28 (aCD28) and a fourth Fv targets CD3. See FIGS. 28 and 33.

[1378] Antibody heavy chain variable domain (VH) and light chain variable domain (VL) sequences targeting human CD3, CD28, Trop2, and cMet were selected from publicly available databases (e.g., GenBank) or patents to illustrate the feasibility of constructing various formats of trispecific antibodies. Linkers in various length and sequence connecting VH and VL regions in different orders and orientations were tested, with and without different motifs of the constant domains (e.g., CL, CH1, CH2, CH3). “Knob” and “hole” mutations were integrated into respective halves of the antibody Fc region when Fe heterodimerization was needed. Effector function or half-life extension mutations can also be incorporated into the Fc sequences when needed. Once the amino acid sequences for each trispecific antibody molecule were assembled, DNA encoding these sequences were codon optimized, synthesized (Cambridge Biologics, LLC, Brookline, Mass.), and cloned into a eukaryotic expression vector.

### Example 16

### Expression and Purification of Masked and Non-Masked Multispecific Molecules

[1379] Masked and non-masked antibodies were produced by transient transfection of expression plasmids into Expi293F cells at density of 2.5-3.0×10⁶ per ml using PEI (Polyscience). Plasmid DNA and PEI were diluted in OPTi-MEM (LifeTech) separately and mixed later. The plasmid/PEI mixture, at a ratio of 1:3 (w:w), was added to the cell culture 10 minutes after mixing. Valproic acid and sodium propionate were added to final concentrations of 0.5 mM and 5 mM, respectively, 16-20 hours post transfection. Supernatant was harvested 5 days post transfection, and filtered through a 0.45 pm filter. Multispecific antibodies were then purified first by affinity chromatography using Protein A resins in batch mode according to manufacture's standard procedures. After antibodies were eluted using IgG elusion buffer (Thermo Fischer Scientific) from protein A, they were dialyzed into 10 mM Histidine (pH6.0)+25 mM NaCl overnight. Antibodies were further purified by size exclusion chromatography using Hiload 16/600 Superdex 200 PG or Superdex 200 Increase 10/300 GL (Cytiva Lifesciences). Fractions with the correct elusion profile were collected and concentrated for further characterization.

### Example 17

### In Vitro Protease Treatment of Masked Multispecific Molecules

[1380] Purified masked multispecific molecules at 1 μg/ml were incubated with 0.2 pg/ml activated Matriptase (MTP) (R & D systems, Cat #3946-SEB) or 0.4 pg/ml MMP9 (R & D system, Cat #911_MP) at 37° C. for 4 hours. 2 μg of digested proteins were run on SDS-PAGE.

[1381] FIG. 28 shows SDS-PAGE results of in vitro cleavage of exemplary masked tetraspecific molecules as depicted. Molecules were treated with either MTP or MMP9 protease as specified. GS: non-cleavable linker sequences are on both light chain (LC) and heavy chain (HC). LC_mmp:MMP2 sensitive linker sequences are on LC, and non-cleavable linker sequences are on HC. HC_mtp:MTP sensitive linker sequences are on HC, and non-cleavable linker sequences are on LC.

### Example 18

### ELISA Binding Analysis of Masked and Non-Masked Multispecific Molecules

[1382] An ELISA binding assay was used to test binding of multispecific molecules to their target antigens. Target protein for each binding site of the multispecific molecules was coated in the wells of 96-well Immuno Plate (Thermo Fisher Scientific) overnight at 4° C. Coated plates were blocked using 5% skim milk+2% BSA in PBS+0.25% Tween for one hour at room temperature, then washed with PBS+0.25% Tween 20 for three times. Serial diluted multispecific molecules and control molecules were added to the plate and incubated at room temperature for 1 hour. Plates were washed three times with PBS+0.25% Tween 20, incubated with HPR conjugated detection antibody for one hour at room temperature, washed again, and then developed with Peroxidase Substrate (KPL, Gaithersburg, Md., USA). After the reaction was terminated by adding 100 μL of KPL TMB BlueSTOP solution, the plate was read at OD₆₅₀ using a plate reader and data analyzed in GraphPad Prism.

[1383] FIG. 29 shows ELISA binding results of exemplary masked tetraspecific molecules as depicted in FIG. 28, or negative isotype (Control IgG1), with or without protease treatment. Molecules cleaved or not cleaved by MTP or MMP9 as specified were tested for binding affinity to Trop2 and cMet. Affinities to these two targets were not affected by protease treatment.

[1384] FIG. 30 shows ELISA binding results of exemplary masked tetraspecific molecules as depicted in FIG. 28, or negative isotype (Control IgG1), with or without protease treatment. Molecules cleaved or not cleaved by MTP or MMP9 as specified were tested for binding affinity to CD28. Affinities to these two targets were not affected by protease treatment.

[1385] FIG. 31 shows ELISA binding results of exemplary masked tetraspecific molecules as depicted in FIG. 28, or negative isotype (Control IgG1), with or without protease treatment. Molecules cleaved or not cleaved by MTP or MMP9 as specified were tested for binding affinity to CD3.

[1386] FIG. 33 shows ELISA binding results of exemplary non-masked tetraspecific molecules as depicted, or negative isotype (hIgG1LALPA) control, to their respective targets of hTrop2, hcMet, hCD28, and hCD3.

### Example 19

### T Cell Activation Assay

[1387] T cell activation by multispecific molecules was tested using an in vitro T cell activation assay. Purified human PBMCs (Blood Research Component, Brookline, Mass., USA) were resuspended in culture medium (RPMI1640 with 10% FBS and supplemented with Penicillin Streptomycin)(Gibco) (2.5×10⁵ cells/ml). Serial diluted multispecific and control molecules were first coated onto 96-well flat-bottom culture plates by incubating for 2-4 hours in a 37° C. tissue culture incubator. PBMCs (200 μL) were then added to each well containing the molecules and incubated for 16-24 hours in a 37° C. tissue culture incubator. The cells were spun down, stained with florescent labeled antibodies for T cell activation marker CD69, and analyzed by an Attune flow cytometer (Thermo Fisher Scientific, USA). Data was analyzed using FlowJo software.

[1388] FIG. 34 shows CD69+ activation by exemplary non-masked tetraspecific molecules, or negative isotype (IgG1LALPA) control, of CD2+ T cells from PBMCs of two different donors.

### Example 20

### In Vitro Cytolytic Assay

[1389] Cytolysis of lymphoma tumor cells Z-138 by T cells mediated by trispecific antibodies was determined using an in vitro cytolytic assay. PBMCs were isolated from normal human donors by Ficoll separation. In vitro cytotoxicity assay was real-time monitored of cellular phenotypic changes by measurement of electrical impedance using the Agilent×CELLigence RTCA MP system. The system measures impedance using interdigitated microelectrodes integrated into the bottom of each well of the tissue culture E-Plates 96. Briefly, tumor cell HCC1954 were seeded into an E-plate 96 as target cells (T) at 20K/well culture at 37° C. for overnight, followed by the addition of human PBMC cells as immune effector cells (E) at 200K/well, in the presence of the 5-fold serially diluted multispecific antibody or human IgG1 isotype control. Cell impedance (measured as the cell index) was normalized when the effector cells were added and monitored continuously every 30 min for a duration of up to 160 hours. The cytotoxicity was calculated as Lysis %=100−(experimental normalized cell index/average of control antibody group normalized cell index at same concentration)×100.

[1390] FIG. 32 shows cytolysis of HCC1954 tumor cells by PBMCs (E:T:10:1) mediated by exemplary masked tetraspecific molecules as depicted in FIG. 28, or negative isotype (Control IgG1), from PBMCs of two donors (KP63250 and KP63251).

### Example 21

### Design of Additional Antibody Constructs

[1391] A further non-limiting example of an additional antibody configuration is shown in FIG. 35. Variable domains (Fv) of the antibody are shown as heavy chain/light chain pairs, along with Fc domain. Also shown (TNF) is a trimer of extracellular domains of a tumor necrosis factor superfamily (TNFSF) ligand (e.g., 4-1BBL or OX-40L). TNF can be present on both arms of the antibody (shown in FIG. 33) or present on one arm and not the other. This example includes, but is not limited to, an antigen binding polypeptide complex comprising a first polypeptide having an amino acid sequence of any one of SEQ ID NOs:316-326 and 697, and a second polypeptide having an amino acid sequence of any one of SEQ ID NOs:316-326 and 697.

### Example 22

### BLI and Flow Cytometry Analysis of Additional Antibody Constructs

[1392] A further non-limiting example of an tetravalent, bispecific antibody configuration is shown in FIG. 36A, called MX846 (SEQ ID NOs:617-620). Other examples that were made include MX847 (SEQ ID NOs:621-624), MX850 (SEQ ID NOs:625-628), MX852 (SEQ ID NOs:633-636), and MX854 (SEQ ID NO:641-644). MX846 was analyzed for binding to CD3 by biolayer interferometry (BLI) (FIG. 36B), and to CD20 by flow cytometry (FIG. 36C) as follows.

### Binding Kinetic Analyses by Biolayer Interferometer

[1393] On the Octet® R8 (Sartorius), recombinant His-tagged CD3, BMCA, or CD28 was loaded by His-tag capture onto HIS1K biosensors (100 nM ligand, 300 seconds, 1000 RPM). After baseline step (100 seconds, 1000 RPM), association with each test molecule (100 nM analyte) was monitored (300 seconds, 1000 RPM). Dissociation was then monitored (300 seconds, 1000 RPM).

[1394] All assay steps occurred in 1× kinetic buffer (1×PBS pH 7.4; 0.1% BSA; 0.02% Tween-20) at 24 degrees C. Prior to each kinetic cycle, the HIS1K biosensors were regenerated in 1.5 pH glycine (5 seconds, 1000 RPM) and neutralized in 1× kinetic buffer (5 seconds, 1000 RPM) 5 consecutive times and then equilibrated back to 1× kinetic buffer (100 seconds; 1000 RPM).

[1395] Binding model fit assumed a 1:1 binding model and fit the association and dissociation together. Baseline was determined by mean of last five seconds of baseline step.

### In Vitro Cell Surface Binding by Flow Cytometry

[1396] Expi293 cells transfected hCD20 were seeded in 96 U-bottom plate at 1×10e5 cells/well. The TASER antibody or human IgG1 isotype control were added at final concentration 1-10 μg/ml and incubated on ice or at 4° C. for 20-30 minutes. Then, cells were spun down and stained with anti-human Fc PE (Jackson Immuno Research Cat #109-115-098) and viability dye (Invitrogen Cat #65-0864-14). Stained cells were analyzed by flow cytometry and the binding ability were presented as PE positive population among total live cells.

[1397] The results in FIGS. 36B and 36C show that MX846 bound to CD3 and CD20.

### Example 23

### BLI and Flow Cytometry Analysis of Additional Antibody Constructs

[1398] A further non-limiting example of a tetravalent, trispecific antibody configuration is shown in FIG. 37A, called MX855 (SEQ ID NOs:645-648). MX855 was analyzed for binding to CD3 and CD28 by biolayer interferometry (BLI) (FIG. 37B), and to CD20 by flow cytometry (FIG. 37C), using the methods explained above. The results in FIGS. 37B and 37C show that MX855 bound to CD3, CD28 and CD20.

### Example 24

### BLI and Flow Cytometry Analysis of Additional Antibody Constructs

[1399] A further non-limiting example of a tetraspecific antibody configuration is shown in FIG. 38A, called MX851 (SEQ ID NOs:629-632). MX851 was analyzed for binding to CD3, CD28 and BCMA by biolayer interferometry (BLI) (FIG. 38B), and to CD20 by flow cytometry (FIG. 38C), using the methods explained above. The results in FIGS. 38B and 38C show that MX851 bound to CD3, CD28, BCMA and CD20.

### Example 25

### BLI and Flow Cytometry Analysis of Additional Antibody Constructs

[1400] A further non-limiting example of a tetraspecific antibody configuration is shown in FIG. 39A, called MX853 (SEQ ID NOs:637-640). MX853 was analyzed for binding to CD3, CD28 and BCMA by biolayer interferometry (BLI) (FIG. 39B), and to CD20 by flow cytometry (FIG. 39C), using the methods explained above. The results in FIGS. 39B and 39C show that MX853 bound to CD3, CD28, BCMA and CD20.

### Example 26

### Killing of Mantle Cell Lymphoma with Additional Antibody Constructs

[1401] In vitro killing of Z-138 tumor cells by T cells mediated by tetravalent, tetraspecific MX851 and tetravalent, trispecific MX855 was analyzed. B-lymphoma Z-138 was pre-labeled with PKH26 (Sigma Cat #PKH26GL-1KT) and seeded into a 96-well U-bottom plate as target cells (T) at 20K/well), in the presence of the 5-fold serially diluted TASER antibody or human IgG1 isotype control (hIgG1LALAPA). Human Pan-T cells isolated from healthy donor PBMC with Dynabeads® Untouched™ Human T Cells kit (Invitrogen Cat #11344D) were added as immune effector cells (E) at 60K/well (E:T=3:1) and incubated at 37° C. for 24-48 hours. The cells were spun down and stained with Viability Dye eFluor™ 660 (Invitrogen Cat #65-0864-14) after incubation. Stained cells were analyzed by flow cytometry for live cell counts. The cytotoxicity was calculated as Lysis %=100−(experimental live cell number/average of control antibody group live cell number at same concentration)*100.

[1402] The results in FIGS. 40A-40B show that both MX851 (FIG. 40A) and MX855 (FIG. 40B) mediated killing of Z-138 tumor cells.

### Example 27

### BLI Analysis of Additional Antibody Constructs

[1403] A further non-limiting example of a trispecific antibody configuration is shown in FIG. 41A, called MX894 (SEQ ID NOs:649-652; VRC01scFv/PGT121x10e8v4L1IgG1LS). MX894 was analyzed for binding to 10e8 fusion peptide, and CD4 site-dependent and CD4 site-independent HIV spike protein by biolayer interferometry (BLI) as follows.

### Binding Kinetic Analyses by Biolayer Interferometry

[1404] On the Octet® R8 (Sartorius), recombinant His-tagged HIV RCS3, HIV gp140ACD4, or HIV 10e8 peptide was loaded by His-tag capture onto HIS1K biosensors (100 nM ligand, 300 seconds, 1000 RPM). After baseline step (100 seconds, 1000 RPM), association with each test molecule as indicated (100 nM analyte) was monitored (300 seconds, 1000 RPM). Dissociation was then monitored (300 seconds, 1000 RPM).

[1405] All assay steps occurred in 1× kinetic buffer (1×PBS pH 7.4; 0.1% BSA; 0.02% Tween-20) at 24 degrees C. Prior to each kinetic cycle, the HISIK biosensors were regenerated in 1.5 pH glycine (5 seconds, 1000 RPM) and neutralized in 1× kinetic buffer (5 seconds, 1000 RPM) 5 consecutive times and then equilibrated back to 1× kinetic buffer (100 seconds; 1000 RPM).

[1406] Binding model fit assumed a 1:1 binding model and fit the association and dissociation together. Baseline was determined by mean of last five seconds of baseline step.

[1407] The results in FIGS. 41B-41D show that MX894 bound to 10e8 fusion peptide (FIG. 41B), and CD4 site-dependent (FIG. 41C) and CD4 site-independent (FIG. 41D) HIV spike protein.

### Example 28

### BLI Analysis of Additional Antibody Constructs

[1408] A further non-limiting example of a tetraspecific antibody configuration is shown in FIG. 42A, called MX873 (SEQ ID NOs:653-656; VRC26.25×10-1074L9/VRC01×PGT121L1 IgG1LS). MX873 was analyzed for binding to CD4 site-dependent and CD4 site-independent HIV spike protein by biolayer interferometry (BLI) as described above.

[1409] The results in FIGS. 42B-42C show that MX873 bound to CD4 site-dependent (FIG. 42B) and CD4 site-independent (FIG. 42C) HIV spike protein.

### Example 29

### BLI Analysis of Additional Antibody Constructs

[1410] A further non-limiting example of a tetraspecific antibody configuration is shown in FIG. 43A, called MX875 (SEQ ID NOs:657-660; 10-1074×VRC26.25L9/VRC01×PGT121L1 IgG1LS). MX875 was analyzed for binding to CD4 site-dependent and CD4 site-independent HIV spike protein by biolayer interferometry (BLI) as described above.

[1411] The results in FIGS. 43B-43C show that MX875 bound to CD4 site-dependent (FIG. 43B) and CD4 site-independent (FIG. 43C) HIV spike protein.

### Example 30

### BLI Analysis of Additional Antibody Constructs

[1412] A further non-limiting example of a tetraspecific antibody configuration is shown in FIG. 44A, called MX877 (SEQ ID NOs:661-644; STAR_VRC26.25×PGT128L9/STAR_VRC01×PGT121L1 IgG1LS). MX877 was analyzed for binding to CD4 site-dependent and CD4 site-independent HIV spike protein by biolayer interferometry (BLI) as described above.

[1413] The results in FIGS. 44B-44C show that MX877 bound to CD4 site-dependent (FIG. 44B) and CD4 site-independent (FIG. 44C) HIV spike protein.

### Example 31

### BLI Analysis of Additional Antibody Constructs

[1414] A further non-limiting example of a trivalent, bispecific antibody configuration is shown in FIG. 45A, called MX848 (SEQ ID NOs:673-678). An additional trivalent, bispecific antibody configuration was also prepared as MX849 (SEQ ID NOs:679-684). MX848 was analyzed for binding to CD3 by biolayer interferometry (BLI) (FIG. 45B), and binding to CD20 by flow cytometry (FIG. 45C), as follows.

### Binding Kinetic Analyses Biolayer-Interferometry

[1415] On the Octet R8 (Sartorius), recombinant His-tagged CD3 was loaded by His-tag capture onto HISIK biosensors (100 nM ligand, 300 seconds, 1000 RPM). After baseline step (100 seconds, 1000 RPM), association with each test molecule (100 nM analyte) was monitored (300 seconds, 1000 RPM). Dissociation was then monitored (300 seconds, 1000 RPM).

[1416] All assay steps occurred in 1× kinetic buffer (1×PBS pH 7.4; 0.1% BSA; 0.02% Tween-20) at 24 degrees C. Prior to each kinetic cycle, the HIS1K biosensors were regenerated in 1.5 pH glycine (5 seconds, 1000 RPM) and neutralized in 1× kinetic buffer (5 seconds, 1000 RPM) 5 consecutive times and then equilibrated back to 1× kinetic buffer (100 seconds; 1000 RPM).

[1417] Binding model fit assumed a 1:1 binding model and fit the association and dissociation together. Baseline was determined by mean of last five seconds of baseline step.

### In Vitro Cell Surface Binding by Flow Cytometry

[1418] Expi293 cells transfected hCD20 were seeded in 96 U-bottom plate at 1×10e5 cells/well. The TASER antibody or human IgG1 isotype control were added at final concentration 1-10 μg/ml and incubated on ice or at 4° C. for 20-30 minutes. Then cells were spun down and stained with anti-human Fc PE (Jackson Immuno Research Cat #109-115-098) and viability dye (Invitrogen Cat #65-0864-14). Stained cells were analyzed by flow cytometry and the binding ability were presented as PE positive population among total live cells.

[1419] The results in FIGS. 45B-45C show that MX848 bound to CD3 (FIG. 45B) and CD20 (FIG. 45C).

### Example 32

### BLI Analysis of Additional Antibody Constructs

[1420] A further non-limiting example of a trispecific antibody configuration is shown in FIG. 46A, called MX857 (SEQ ID NOs:691-696). An additional example of a trispecific antibody configuration was made as MX856 (SEQ ID NOs:685-690). MX857 was analyzed for binding to CD3 and CD28 by biolayer interferometry (BLI), and binding to CD20 by flow cytometry, as described above. MX857 was also analyzed for the ability to mediate killing of Mantle Cell lymphoma cell line Z-138 by T-cells, as follows.

### In Vitro Killing of Z-138 Tumor Cells Mediated by Multispecific Antibodies

[1421] B-lymphoma Z-138 was pre-labeled with PKH26 (Sigma Cat #PKH26GL-1KT) and seeded into a 96-well U-bottom plate as target cells (T) at 20K/well, in the presence of the 5-fold serially diluted TASER antibody or human IgG1 isotype control. Human Pan-T cells isolated from healthy donor PBMC with Dynabeads® Untouched™ Human T Cells kit (Invitrogen Cat #11344D) were added as immune effector cells (E) at 60K/well (E:T=3:1) and incubated at 37° C. for 24-48 hours. The cells were spun down and stained with Viability Dye eFluor™ 660 (Invitrogen Cat #65-0864-14) after incubation. Stained cells were analyzed by flow cytometry for live cell counts. The cytotoxicity was calculated as Lysis %=100−(experimental live cell number/average of control antibody group live cell number at same concentration)*100.

[1422] FIG. 46B shows that MX857 bound to both CD3 and CD28. FIG. 46C shows that MX857 also bound to CD20. In addition, FIG. 46D shows that MX857 mediates killing of Mantle Cell lymphoma cell line Z-138 by T-cells.

[1423] All publications, patents and patent applications mentioned in this application are herein incorporated in their entirety by reference into the specification, to the same extent as if each individual publication, patent or patent application was specifically and individually indicated to be incorporated herein by reference. In addition, citation or identification of any reference in this application shall not be construed as an admission that such reference is available as prior art to the present invention. To the extent that section headings are used, they should not be construed as necessarily limiting.

The application's sequence listing, which the Patent Office published only in electronic form, follows.

SEQUENCE LISTING (697 sequences)

SEQ ID NO: 1 - protein, 5 aa, synthetic construct
  REGION 1..5: note = _
GGSSG

SEQ ID NO: 2 - protein, 5 aa, synthetic construct
  REGION 1..5: note = _
GSSGS

SEQ ID NO: 3 - protein, 5 aa, synthetic construct
  REGION 1..5: note = _
GTVAA

SEQ ID NO: 4 - protein, 5 aa, synthetic construct
  REGION 1..5: note = _
ASGGS

SEQ ID NO: 5 - protein, 5 aa, synthetic construct
  REGION 1..5: note = _
ASTGG

SEQ ID NO: 6 - protein, 6 aa, synthetic construct
  REGION 1..6: note = _
ASGGSG

SEQ ID NO: 7 - protein, 10 aa, synthetic construct
  REGION 1..10: note = _
GGSGGSSGSS

SEQ ID NO: 8 - protein, 10 aa, synthetic construct
  REGION 1..10: note = _
SGGSGSSGGS

SEQ ID NO: 9 - protein, 18 aa, synthetic construct
  REGION 1..18: note = _
GGSGGSGSGGGGSASGSG

SEQ ID NO: 10 - protein, 20 aa, synthetic construct
  REGION 1..20: note = _
GGGSSGGGGSGGSGSGGSGS

SEQ ID NO: 11 - protein, 20 aa, synthetic construct
  REGION 1..20: note = _
GGGGSGGSGSGGGGSASGSG

SEQ ID NO: 12 - protein, 20 aa, synthetic construct
  REGION 1..20: note = _
GGGSSGGSGSGGSGSGGSGS

SEQ ID NO: 13 - protein, 22 aa, synthetic construct
  REGION 1..22: note = _
SGGSSGGSGSGGSGSGGSGSSG

SEQ ID NO: 14 - protein, 22 aa, synthetic construct
  REGION 1..22: note = _
GSGSSGGGGSGGSGSGGSGSSG

SEQ ID NO: 15 - protein, 40 aa, synthetic construct
  REGION 1..40: note = _
GGGGSGSGGSGGGSSGGGGSGGGGSGGGGSGGGGSGGGGS

SEQ ID NO: 16 - protein, 40 aa, synthetic construct
  REGION 1..40: note = _
GGGGSGGGGSGGGGSGGGGSGGGGSGGGGSGGGGSGGGGS

SEQ ID NO: 17 - protein, 43 aa, synthetic construct
  REGION 1..43: note = _
GGGGSGSGGSGGGSSGGGGSGGGGSGGGGSGGGGSGGGGSSSS

SEQ ID NO: 18 - protein, 45 aa, synthetic construct
  REGION 1..45: note = _
GGGGSGSGGSGGGSSGGGGSGGGGSGGGGSGGGGSGGGGSSSSGS

SEQ ID NO: 19 - protein, 17 aa, synthetic construct
  REGION 1..17: note = _
GGSGGSGSGGGSASGSG

SEQ ID NO: 20 - protein, 119 aa, synthetic construct
  REGION 1..119: note = _
DIKLQQSGAELARPGASVKMSCKTSGYTFTRYTMHWVKQRPGQGLEWIGYINPSRGYTNYNQKFKDKATLTTDKSSSTAYMQLSSLTSEDSAVYYCARYYDDHYSLDYWGQGTTLTVSS

SEQ ID NO: 21 - protein, 120 aa, synthetic construct
  REGION 1..120: note = _
QVQLVQSGAEVKKPGASVKVSCKASGYTFTSYYIHWVRQAPGQGLEWIGSIYPGNVNTNYNEKFKDRATLTVDTSISTAYMELSRLRSDDTAVYFCTRSHYGLDWNFDVWGQGTTVTVSS

SEQ ID NO: 22 - protein, 122 aa, synthetic construct [sequence omitted]

SEQ ID NO: 23 - protein, 124 aa, synthetic construct
  REGION 1..124: note = _
QVQLQQSGAELVRPGSSVKISCKASGYAFSSYWMNWVKQRPGQGLEWIGQIWPGDGDTNYNGKFKGKATLTADESSSTAYMQLSSLASEDSAVYFCARRETTTVGRYYYAMDYWGQGTTVTVSS

SEQ ID NO: 24 - protein, 120 aa, synthetic construct
  REGION 1..120: note = _
QVQLVQSGAEVVKPGASVKVSCKASGYTFTSYYIHWVRQAPGQGLEWIGSIYPGNVNTNYAQKFQGRATLTVDTSISTAYMELSRLRSDDTAVYYCTRSHYGLDWNFDVWGKGTTVTVSS

SEQ ID NO: 25 - protein, 121 aa, synthetic construct
  REGION 1..121: note = _
QVQLVESGGGVVQPGRSLRLSCAASGFTFTKAWMHWVRQAPGKQLEWVAQIKDKSNSYATYYADSVKGRFTISRDDSKNTLYLQMNSLRAEDTAVYYCRGVYYALSPFDYWGQGTLVTVSS

SEQ ID NO: 26 - protein, 106 aa, synthetic construct
  REGION 1..106: note = _
DIQLTQSPAIMSASPGEKVTMTCRASSSVSYMNWYQQKSGTSPKRWIYDTSKVASGVPYRFSGSGSGTSYSLTISSMEAEDAATYYCQQWSSNPLTFGAGTKLELK

SEQ ID NO: 27 - protein, 107 aa, synthetic construct
  REGION 1..107: note = _
DIQMTQSPSSLSASVGDRVTITCHASQNIYVWLNWYQQKPGKAPKLLIYKASNLHTGVPSRFSGSGSGTDFTLTISSLQPEDFATYYCQQGQTYPYTFGGGTKVEIK

SEQ ID NO: 28 - protein, 111 aa, synthetic construct
  REGION 1..111: note = _
DIQLTQSPASLAVSLGQRATISCKASQSVDYDGDSYLNWYQQIPGQPPKLLIYDASNLVSGIPPRFSGSGSGTDFTLNIHPVEKVDAATYHCQQSTEDPWTFGGGTKLEIK

SEQ ID NO: 29 - protein, 107 aa, synthetic construct [sequence omitted]

SEQ ID NO: 30 - protein, 107 aa, synthetic construct
  REGION 1..107: note = _
DIQMTQSPSSLSASVGDRVTITCQASQNIYVWLNWYQQKPGKAPKLLIYKASNLHTGVPSRFSGSGSGTDFTLTISSLQPEDIATYYCQQGQTYPYTFGQGTKLEIK

SEQ ID NO: 31 - protein, 112 aa, synthetic construct
  REGION 1..112: note = _
DIVMTQTPLSLSVTPGQPASISCKSSQSLVHNNANTYLSWYLQKPGQSPQSLIYKVSNRFSGVPDRFSGSGSGTDFTLKISRVEAEDVGVYYCGQGTQYPFTFGSGTKVEIK

SEQ ID NO: 32 - protein, 490 aa, synthetic construct
  REGION 1..490: note = _
DIQMTQSPSSLSASVGDRVTITCHASQNIYVWLNWYQQKPGKAPKLLIYKASNLHTGVPSRFSGSGSGTDFTLTISSLQPEDFATYYCQQGQTYPYTFGGGTKVEIKGGSSGDIQLTQSPAIMSASPGEKVTMTCRASSSVSYMNWYQQKSGTSPKRWIYDTSKVASGVPYRFSGSGSGTSYSLTISSMEAEDAATYYCQQWSSNPLTFGAGTKLELKGGGGSGGSGSGGGGSASGSGDIKLQQSGAELARPGASVKMSCKTSGYTFTRYTMHWVKQRPGQGLEWIGYINPSRGYTNYNQKFKDKATLTTDKSSSTAYMQLSSLTSEDSAVYYCARYYDDHYSLDYWGQGTTLTVSSGGSSGQVQLVQSGAEVKKPGASVKVSCKASGYTFTSYYIHWVRQAPGQGLEWIGSIYPGNVNTNYNEKFKDRATLTVDTSISTAYMELSRLRSDDTAVYFCTRSHYGLDWNFDVWGQGTTVTVSSHHHHHHHH

SEQ ID NO: 33 - protein, 502 aa, synthetic construct
  REGION 1..502: note = _
DIQLTQSPASLAVSLGQRATISCKASQSVDYDGDSYLNWYQQIPGQPPKLLIYDASNLVSGIPPRFSGSGSGTDFTLNIHPVEKVDAATYHCQQSTEDPWTFGGGTKLEIKGGSSGEIVLTQSPATLSLSPGERATLSCRASQSVSSYLAWYQQKPGQAPRLLIYDASNRATGIPARFSGSGSGTDFTLTISSLEPEDFAVYYCQQRSNWPPTFGQGTKVEIKGGGGSGGSGSGGGGSASGSGEVQLLESGGGLVQPGGSLRLSCAVSGFTFNSFAMSWVRQAPGKGLEWVSAISGSGGGTYYADSVKGRFTISRDNSKNTLYLQMNSLRAEDTAVYFCAKDKILWFGEPVFDYWGQGTLVTVSSGGSSGQVQLQQSGAELVRPGSSVKISCKASGYAFSSYWMNWVKQRPGQGLEWIGQIWPGDGDTNYNGKFKGKATLTADESSSTAYMQLSSLASEDSAVYFCARRETTTVGRYYYAMDYWGQGTTVTVSSHHHHHHHH

SEQ ID NO: 34 - protein, 722 aa, synthetic construct
  REGION 1..722: note = _
DIQMTQSPSSLSASVGDRVTITCQASQNIYVWLNWYQQKPGKAPKLLIYKASNLHTGVPSRFSGSGSGTDFTLTISSLQPEDIATYYCQQGQTYPYTFGQGTKLEIKGGSSGDIVMTQTPLSLSVTPGQPASISCKSSQSLVHNNANTYLSWYLQKPGQSPQSLIYKVSNRFSGVPDRFSGSGSGTDFTLKISRVEAEDVGVYYCGQGTQYPFTFGSGTKVEIKGGGGSGGSGSGGGGSASGSGQVQLVESGGGVVQPGRSLRLSCAASGFTFTKAWMHWVRQAPGKQLEWVAQIKDKSNSYATYYADSVKGRFTISRDDSKNTLYLQMNSLRAEDTAVYYCRGVYYALSPFDYWGQGTLVTVSSGGSSGQVQLVQSGAEVVKPGASVKVSCKASGYTFTSYYIHWVRQAPGQGLEWIGSIYPGNVNTNYAQKFQGRATLTVDTSISTAYMELSRLRSDDTAVYYCTRSHYGLDWNFDVWGKGTTVTVSSASGGSGDKTHTCPPCPAPEAAGGPSVFLFPPKPKDTLMISRTPEVTCVVVDVSHEDPEVKFNWYVDGVEVHNAKTKPREEQYNSTYRVVSVLTVLHQDWLNGKEYKCKVSNKALAAPIEKTISKAKGQPREPQVCTLPPSRDELTKNQVSLSCAVKGFYPSDIAVEWESNGQPENNYKTTPPVLDSDGSFFLVSKLTVDKSRWQQGNVFSCSVMHEALHNHYTQKSLSLSPG

SEQ ID NO: 35 - protein, 722 aa, synthetic construct
  REGION 1..722: note = _
DIQMTQSPSSLSASVGDRVTITCQASQNIYVWLNWYQQKPGKAPKLLIYKASNLHTGVPSRFSGSGSGTDFTLTISSLQPEDIATYYCQQGQTYPYTFGQGTKLEIKGTVAADIVMTQTPLSLSVTPGQPASISCKSSQSLVHNNANTYLSWYLQKPGQSPQSLIYKVSNRFSGVPDRFSGSGSGTDFTLKISRVEAEDVGVYYCGQGTQYPFTFGSGTKVEIKGGGGSGGSGSGGGGSASGSGQVQLVESGGGVVQPGRSLRLSCAASGFTFTKAWMHWVRQAPGKQLEWVAQIKDKSNSYATYYADSVKGRFTISRDDSKNTLYLQMNSLRAEDTAVYYCRGVYYALSPFDYWGQGTLVTVSSASTGGQVQLVQSGAEVVKPGASVKVSCKASGYTFTSYYIHWVRQAPGQGLEWIGSIYPGNVNTNYAQKFQGRATLTVDTSISTAYMELSRLRSDDTAVYYCTRSHYGLDWNFDVWGKGTTVTVSSASGGSGDKTHTCPPCPAPEAAGGPSVFLFPPKPKDTLMISRTPEVTCVVVDVSHEDPEVKFNWYVDGVEVHNAKTKPREEQYNSTYRVVSVLTVLHQDWLNGKEYKCKVSNKALAAPIEKTISKAKGQPREPQVCTLPPSRDELTKNQVSLSCAVKGFYPSDIAVEWESNGQPENNYKTTPPVLDSDGSFFLVSKLTVDKSRWQQGNVFSCSVMHEALHNHYTQKSLSLSPG

SEQ ID NO: 36 - protein, 722 aa, synthetic construct
  REGION 1..722: note = _
DIVMTQTPLSLSVTPGQPASISCKSSQSLVHNNANTYLSWYLQKPGQSPQSLIYKVSNRFSGVPDRFSGSGSGTDFTLKISRVEAEDVGVYYCGQGTQYPFTFGSGTKVEIKGGSSGDIQMTQSPSSLSASVGDRVTITCQASQNIYVWLNWYQQKPGKAPKLLIYKASNLHTGVPSRFSGSGSGTDFTLTISSLQPEDIATYYCQQGQTYPYTFGQGTKLEIKGGGGSGGSGSGGGGSASGSGQVQLVQSGAEVVKPGASVKVSCKASGYTFTSYYIHWVRQAPGQGLEWIGSIYPGNVNTNYAQKFQGRATLTVDTSISTAYMELSRLRSDDTAVYYCTRSHYGLDWNFDVWGKGTTVTVSSGGSSGQVQLVESGGGVVQPGRSLRLSCAASGFTFTKAWMHWVRQAPGKQLEWVAQIKDKSNSYATYYADSVKGRFTISRDDSKNTLYLQMNSLRAEDTAVYYCRGVYYALSPFDYWGQGTLVTVSSASGGSGDKTHTCPPCPAPEAAGGPSVFLFPPKPKDTLMISRTPEVTCVVVDVSHEDPEVKFNWYVDGVEVHNAKTKPREEQYNSTYRVVSVLTVLHQDWLNGKEYKCKVSNKALAAPIEKTISKAKGQPREPQVCTLPPSRDELTKNQVSLSCAVKGFYPSDIAVEWESNGQPENNYKTTPPVLDSDGSFFLVSKLTVDKSRWQQGNVFSCSVMHEALHNHYTQKSLSLSPG

SEQ ID NO: 37 - protein, 722 aa, synthetic construct
  REGION 1..722: note = _
DIVMTQTPLSLSVTPGQPASISCKSSQSLVHNNANTYLSWYLQKPGQSPQSLIYKVSNRFSGVPDRFSGSGSGTDFTLKISRVEAEDVGVYYCGQGTQYPFTFGSGTKVEIKGTVAADIQMTQSPSSLSASVGDRVTITCQASQNIYVWLNWYQQKPGKAPKLLIYKASNLHTGVPSRFSGSGSGTDFTLTISSLQPEDIATYYCQQGQTYPYTFGQGTKLEIKGGGGSGGSGSGGGGSASGSGQVQLVQSGAEVVKPGASVKVSCKASGYTFTSYYIHWVRQAPGQGLEWIGSIYPGNVNTNYAQKFQGRATLTVDTSISTAYMELSRLRSDDTAVYYCTRSHYGLDWNFDVWGKGTTVTVSSASTGGQVQLVESGGGVVQPGRSLRLSCAASGFTFTKAWMHWVRQAPGKQLEWVAQIKDKSNSYATYYADSVKGRFTISRDDSKNTLYLQMNSLRAEDTAVYYCRGVYYALSPFDYWGQGTLVTVSSASGGSGDKTHTCPPCPAPEAAGGPSVFLFPPKPKDTLMISRTPEVTCVVVDVSHEDPEVKFNWYVDGVEVHNAKTKPREEQYNSTYRVVSVLTVLHQDWLNGKEYKCKVSNKALAAPIEKTISKAKGQPREPQVCTLPPSRDELTKNQVSLSCAVKGFYPSDIAVEWESNGQPENNYKTTPPVLDSDGSFFLVSKLTVDKSRWQQGNVFSCSVMHEALHNHYTQKSLSLSPG

SEQ ID NO: 38 - protein, 714 aa, synthetic construct
  REGION 1..714: note = _
DIQMTQSPSSLSASVGDRVTITCHASQNIYVWLNWYQQKPGKAPKLLIYKASNLHTGVPSRFSGSGSGTDFTLTISSLQPEDFATYYCQQGQTYPYTFGGGTKVEIKGGSSGDIQLTQSPAIMSASPGEKVTMTCRASSSVSYMNWYQQKSGTSPKRWIYDTSKVASGVPYRFSGSGSGTSYSLTISSMEAEDAATYYCQQWSSNPLTFGAGTKLELKGGGGSGGSGSGGGGSASGSGDIKLQQSGAELARPGASVKMSCKTSGYTFTRYTMHWVKQRPGQGLEWIGYINPSRGYTNYNQKFKDKATLTTDKSSSTAYMQLSSLTSEDSAVYYCARYYDDHYSLDYWGQGTTLTVSSGGSSGQVQLVQSGAEVKKPGASVKVSCKASGYTFTSYYIHWVRQAPGQGLEWIGSIYPGNVNTNYNEKFKDRATLTVDTSISTAYMELSRLRSDDTAVYFCTRSHYGLDWNFDVWGQGTTVTVSSASGGSGDKTHTCPPCPAPEAAGGPSVFLFPPKPKDTLMISRTPEVTCVVVDVSHEDPEVKFNWYVDGVEVHNAKTKPREEQYNSTYRVVSVLTVLHQDWLNGKEYKCKVSNKALAAPIEKTISKAKGQPREPQVCTLPPSRDELTKNQVSLSCAVKGFYPSDIAVEWESNGQPENNYKTTPPVLDSDGSFFLVSKLTVDKSRWQQGNVFSCSVMHEALHNHYTQKSLSLSPG

SEQ ID NO: 39 - protein, 714 aa, synthetic construct
  REGION 1..714: note = _
DIQLTQSPAIMSASPGEKVTMTCRASSSVSYMNWYQQKSGTSPKRWIYDTSKVASGVPYRFSGSGSGTSYSLTISSMEAEDAATYYCQQWSSNPLTFGAGTKLELKGGSSGDIQMTQSPSSLSASVGDRVTITCHASQNIYVWLNWYQQKPGKAPKLLIYKASNLHTGVPSRFSGSGSGTDFTLTISSLQPEDFATYYCQQGQTYPYTFGGGTKVEIKGGGGSGGSGSGGGGSASGSGQVQLVQSGAEVKKPGASVKVSCKASGYTFTSYYIHWVRQAPGQGLEWIGSIYPGNVNTNYNEKFKDRATLTVDTSISTAYMELSRLRSDDTAVYFCTRSHYGLDWNFDVWGQGTTVTVSSGGSSGDIKLQQSGAELARPGASVKMSCKTSGYTFTRYTMHWVKQRPGQGLEWIGYINPSRGYTNYNQKFKDKATLTTDKSSSTAYMQLSSLTSEDSAVYYCARYYDDHYSLDYWGQGTTLTVSSASGGSGDKTHTCPPCPAPEAAGGPSVFLFPPKPKDTLMISRTPEVTCVVVDVSHEDPEVKFNWYVDGVEVHNAKTKPREEQYNSTYRVVSVLTVLHQDWLNGKEYKCKVSNKALAAPIEKTISKAKGQPREPQVCTLPPSRDELTKNQVSLSCAVKGFYPSDIAVEWESNGQPENNYKTTPPVLDSDGSFFLVSKLTVDKSRWQQGNVFSCSVMHEALHNHYTQKSLSLSPG

SEQ ID NO: 40 - protein, 721 aa, synthetic construct
  REGION 1..721: note = _
DIQLTQSPAIMSASPGEKVTMTCRASSSVSYMNWYQQKSGTSPKRWIYDTSKVASGVPYRFSGSGSGTSYSLTISSMEAEDAATYYCQQWSSNPLTFGAGTKLELKGGSSGDIQMTQSPSSLSASVGDRVTITCHASQNIYVWLNWYQQKPGKAPKLLIYKASNLHTGVPSRFSGSGSGTDFTLTISSLQPEDFATYYCQQGQTYPYTFGGGTKVEIKGGGGSGGSGSGGGGSASGSGQVQLVQSGAEVKKPGASVKVSCKASGYTFTSYYIHWVRQAPGQGLEWIGSIYPGNVNTNYNEKFKDRATLTVDTSISTAYMELSRLRSDDTAVYFCTRSHYGLDWNFDVWGQGTTVTVSSGGSSGDIKLQQSGAELARPGASVKMSCKTSGYTFTRYTMHWVKQRPGQGLEWIGYINPSRGYTNYNQKFKDKATLTTDKSSSTAYMQLSSLTSEDSAVYYCARYYDDHYSLDYWGQGTTLTVSSRTVAAPSVFIFPPSDEQLKSGTASVVCLLNNFYPREAKVQWKVDNALQSGNSQESVTEQDSKDSTYSLSSTLTLSKADYEKHKVYACEVTHQGLSSPVTKSFNRGECGGGGSGGSGSGGGGSASGSGASTKGPSVFPLAPSSKSTSGGTAALGCLVKDYFPEPVTVSWNSGALTSGVHTFPAVLQSSGLYSLSSVVTVPSSSLGTQTYICNVNHKPSNTKVDKKVEPKSCDKTHTCPPC

SEQ ID NO: 41 - protein, 721 aa, synthetic construct
  REGION 1..721: note = _
DIQLTQSPAIMSASPGEKVTMTCRASSSVSYMNWYQQKSGTSPKRWIYDTSKVASGVPYRFSGSGSGTSYSLTISSMEAEDAATYYCQQWSSNPLTFGAGTKLELKGGSSGDIQMTQSPSSLSASVGDRVTITCHASQNIYVWLNWYQQKPGKAPKLLIYKASNLHTGVPSRFSGSGSGTDFTLTISSLQPEDFATYYCQQGQTYPYTFGGGTKVEIKGGGGSGGSGSGGGGSASGSGQVQLVQSGAEVKKPGASVKVSCKASGYTFTSYYIHWVRQAPGQGLEWIGSIYPGNVNTNYNEKFKDRATLTVDTSISTAYMELSRLRSDDTAVYFCTRSHYGLDWNFDVWGQGTTVTVSSGGSSGDIKLQQSGAELARPGASVKMSCKTSGYTFTRYTMHWVKQRPGQGLEWIGYINPSRGYTNYNQKFKDKATLTTDKSSSTAYMQLSSLTSEDSAVYYCARYYDDHYSLDYWGQGTTLTVSSASTKGPSVFPLAPSSKSTSGGTAALGCLVKDYFPEPVTVSWNSGALTSGVHTFPAVLQSSGLYSLSSVVTVPSSSLGTQTYICNVNHKPSNTKVDKKVEPKSCGGGGSGGSGSGGGGSASGSGRTVAAPSVFIFPPSDEQLKSGTASVVCLLNNFYPREAKVQWKVDNALQSGNSQESVTEQDSKDSTYSLSSTLTLSKADYEKHKVYACEVTHQGLSSPVTKSFNRGECDKTHTCPPC

SEQ ID NO: 42 - DNA, 1470 bp, synthetic construct
  misc_feature 1..1470: note = _
  source 1..1470: mol_type = other DNA
gacatccagatgacacagagccctagcagcctgtctgccagcgtgggagacagagtgaccatcacatgtcacgccagccagaacatctacgtgtggctgaactggtatcagcagaagcccggcaaggcccctaagctgctgatctacaaggccagcaatctgcacaccggcgtgcccagcagattttctggctctggcagcggcaccgacttcaccctgaccatatctagcctgcagcctgaggacttcgccacctactattgtcagcagggccagacatacccctacacctttggcggcggaacaaaggtggaaatcaagggcggatcttctggagacatccagctgacacagagccctgccatcatgtctgctagccctggcgagaaagtgaccatgacctgtagagccagcagcagcgtgtcctacatgaactggtatcagcagaagtccggcacaagccccaagcggtggatctacgatacaagcaaggtggccagcggcgtgccctacagattttctggctctggcagcggcaccagctacagcctgacaatcagcagcatggaagccgaggatgccgccacctactactgccagcagtggtccagcaatcccctgacatttggagccggcaccaagctggaactgaagggaggcggaggatctggcggatctggaagtggcggcggtggatctgcttctggctctggcgacatcaagctgcagcagtctggcgccgaacttgctagacctggcgcctctgtgaagatgagctgcaagaccagcggctacaccttcaccagatacaccatgcactgggtcaagcagaggcctggacagggactcgagtggatcggctacatcaaccccagcagaggctacaccaactacaaccagaagttcaaggacaaggccacactgaccaccgacaagagcagcagcacagcctacatgcagctgagcagcctgaccagcgaagatagcgccgtgtactactgcgcccggtactacgacgatcactacagcctggattactggggccagggcacaaccctgacagtgtcatctggcggatcttctggacaggttcagctggttcagtctggcgccgaagtgaagaaacctggcgcctctgtgaaggtgtcctgcaaggccagcggctacacctttaccagctactacatccactgggtccgacaggcccctggacaaggactggaatggatcggcagcatctaccccggcaacgtgaacaccaactacaacgagaagttcaaggaccgggccacactgaccgtggacacctctatcagcaccgcctacatggaactgagccggctgagatccgatgataccgccgtgtacttctgcaccagaagccactacggcctggactggaacttcgatgtgtggggccagggcaccaccgtgacagtttcttctcaccaccatcatcaccatcaccac

SEQ ID NO: 43 - DNA, 1506 bp, synthetic construct
  misc_feature 1..1506: note = _
  source 1..1506: mol_type = other DNA
gacatccagctgacacagagccctgcttctctggccgtgtctctgggacagagagccaccatcagctgcaaggccagccagagcgttgactacgacggcgacagctacctgaactggtatcagcagatccccggccagcctcctaagctgctgatctacgatgccagcaacctggtgtctggcatccctcctagattttccggcagcggctctggcaccgacttcaccctgaatatccatcctgtggaaaaggtggacgccgccacctaccactgtcagcagagcacagaagatccctggacctttggcggaggcaccaagctggaaatcaagggcggatcttctggagagatcgtgctgacacagtctcccgccacactgtcactgtctccaggcgaaagagccacactgagctgtagagccagccagagcgtgtcctcttacctggcctggtatcagcagaagcctggacaggctccccggctgctgatctacgatgccagcaatagagccacaggcatccccgccagattttctggctctggcagcggcaccgatttcaccctgaccataagcagcctggaacctgaggacttcgccgtgtactactgccagcagagaagcaactggcctcctacctttggccagggcaccaaggtggaaatcaagggaggcggaggatctggcggatctggaagtggcggcggtggatctgcttctggctctggcgaagtgcagctgctggaatctggcggaggactggttcaacctggcggctctctgagactgagctgtgccgtgtccggcttcaccttcaacagcttcgccatgagctgggtccgacaggcccctggaaaaggccttgaatgggtgtccgccatctctggaagcggcggaggcacatattacgccgactctgtgaagggcagattcaccatcagccgggacaacagcaagaacaccctgtacctgcagatgaacagcctgagagccgaggataccgccgtgtacttctgcgccaaggacaagatcctttggttcggcgagcccgtgttcgactattggggacagggaaccctggtcaccgtgtctagtggaggcagctctggccaggttcagctgcagcagtctggcgccgaactcgttagacctggcagcagcgtgaagatcagctgcaaggccagcggctacgccttcagcagctactggatgaactgggtcaagcagaggcctggacagggcctcgagtggatcggacaaatttggcctggcgacggcgacaccaactacaacggcaagttcaagggcaaagccacactgaccgccgacgagtctagcagcacagcctacatgcagctgtctagcctggccagcgaagatagcgccgtgtacttctgtgccagacgggaaaccaccaccgtgggcagatattactacgccatggactactggggccagggcaccacagtgacagtctcttctcaccaccatcatcaccatcaccac

SEQ ID NO: 44 - DNA, 2166 bp, synthetic construct
  misc_feature 1..2166: note = _
  source 1..2166: mol_type = other DNA
gacatccagatgacacagagccctagcagcctgtctgccagcgtgggagacagagtgaccattacctgtcaggccagccagaacatctacgtgtggctgaactggtatcagcagaagcccggcaaggcccctaagctgctgatctacaaggccagcaatctgcacaccggcgtgcccagcagattttctggctctggcagcggcaccgacttcaccctgaccatatctagcctgcagcctgaggacattgccacctactactgtcagcagggccagacatacccctacacctttggccagggcaccaagctggaaatcaaaggcggaagcagcggcgacatcgtgatgacccaaacacctctgagcctgagcgtgacacctggacagcctgccagcatcagctgcaagtctagccagagcctggtgcacaacaacgccaacacctacctgtcctggtatctccagaaacctggccagtctcctcagagcctcatctataaggtgtccaacagattcagcggcgtgccagacaggtttagcggctctggatctggcacagatttcacactgaagatcagccgcgtggaagccgaggatgtgggcgtgtactattgcggccagggaacacagtaccctttcacctttggaagcggcacaaaggtcgagatcaaaggtggcggaggaagcggcggatcaggatctggcggcggaggatctgctagcggatctggacaggtgcagctggtggaatctggcggaggtgttgtgcagcctggcagaagcctgagactgtcttgtgccgccagcggcttcacctttaccaaggcctggatgcactgggtccgacaggcacctggaaagcagctggaatgggtcgcccagatcaaggacaagagcaacagctacgccacctattacgccgacagcgtgaagggcagattcaccatcagccgggacgacagcaagaacaccctgtacctgcagatgaacagcctgagagccgaggacaccgccgtgtactactgtagaggggtgtactacgctctgagccccttcgattattggggacagggcaccctggtcaccgtgtctagtggtggatctagtggccaggtccagctcgttcagtctggcgccgaagttgtgaaaccaggcgcctctgtgaaggtgtcctgtaaagcctccggctacacattcaccagctactacatccactgggttcgccaggctccaggccaaggacttgagtggatcggcagcatctaccccggcaacgtgaacaccaactacgcccagaagttccagggcagagccacactgacagtggacaccagcatctccaccgcctacatggaactgagccggctgagatccgacgatacagctgtgtattactgcaccagaagccactacggcctggactggaatttcgacgtgtggggcaagggcaccaccgtgacagttagttctgcttctggcggctccggagataagacccacacatgtcctccatgtcctgctccagaggctgctggtggcccttccgtgtttctgttccctccaaagcctaaggacaccctgatgatcagcaggacccctgaagtgacctgcgtggtggtggatgtgtctcacgaggacccagaagtgaagttcaattggtacgtggacggcgtggaagtgcacaacgccaagaccaagcctagagaggaacagtacaacagcacctacagagtggtgtccgtgctgaccgtgctgcaccaggattggctgaacggcaaagagtacaagtgcaaggtgtccaacaaggccctggccgctcctatcgagaaaaccatcagcaaggccaagggccagcctcgcgaacctcaagtctgtacactgcctcctagccgggacgagctgaccaagaatcaggtgtcactgagctgcgccgtgaagggcttttaccccagcgacattgccgtggaatgggagagcaatggccagccagagaacaactacaagacaacccctcctgtgctggacagcgacggctcatttttcctggtgtccaagctgacagtggacaagagcagatggcagcagggcaacgtgttcagctgcagcgtgatgcacgaggccctgcacaaccactacacccagaaaagcctgtctctgagccctggc

SEQ ID NO: 45 - DNA, 2166 bp, synthetic construct
  misc_feature 1..2166: note = _
  source 1..2166: mol_type = other DNA
gacatccagatgacacagagccctagcagcctgtctgccagcgtgggagacagagtgaccattacctgtcaggccagccagaacatctacgtgtggctgaactggtatcagcagaagcccggcaaggcccctaagctgctgatctacaaggccagcaatctgcacaccggcgtgcccagcagattttctggctctggcagcggcaccgacttcaccctgaccatatctagcctgcagcctgaggacattgccacctactactgtcagcagggccagacatacccctacacctttggccagggcaccaagctggaaatcaagggaacagtggccgccgacatcgtgatgacccagacacctctgagcctgagcgtgacacctggacagcctgccagcatcagctgcaagtctagccagagcctggtgcacaacaacgccaacacctacctgtcctggtatctccagaaacctggccagtctcctcagagcctcatctataaggtgtccaacagattcagcggcgtgccagacaggtttagcggctctggatctggcacagatttcacactgaagatcagccgcgtggaagccgaggatgtgggcgtgtactattgcggccagggaacacagtaccctttcacctttggaagcggcacaaaggtcgagatcaaaggcggcggaggaagcggaggatcaggatctggcggaggcggatctgctagcggatctggacaggtgcagctggttgaaagtggtggcggagttgtgcagcctggcagaagcctgagactgtcttgtgccgccagcggcttcacctttaccaaggcctggatgcactgggtccgacaggcacctggaaagcagctggaatgggtcgcccagatcaaggacaagagcaacagctacgccacctattacgccgactccgtgaagggcagattcaccatcagccgggacgacagcaagaacaccctgtacctgcagatgaacagcctgagagccgaggacaccgccgtgtactactgtagaggggtgtactacgctctgagccccttcgattattggggacagggcaccctggtcaccgtgtctagtgcttctactggtggccaggtccagctcgttcagtctggcgccgaagttgtgaaaccaggcgcctctgtgaaggtgtcctgtaaagcctccggctacacattcaccagctactacatccactgggttcgccaggctccaggccaaggacttgagtggatcggcagcatctaccccggcaacgtgaacaccaactacgcccagaagttccagggcagagccacactgacagtggacaccagcatctccaccgcctacatggaactgagccggctgagatccgacgatacagctgtgtattactgcaccagaagccactacggcctggactggaatttcgacgtgtggggcaagggcaccaccgtgacagttagttctgcttctggcggctccggagataagacccacacatgtcctccatgtcctgctccagaggctgctggtggcccttccgtgtttctgttccctccaaagcctaaggacaccctgatgatcagcaggacccctgaagtgacctgcgtggtggtggatgtgtctcacgaggacccagaagtgaagttcaattggtacgtggacggcgtggaagtgcacaacgccaagaccaagcctagagaggaacagtacaacagcacctacagagtggtgtccgtgctgaccgtgctgcaccaggattggctgaacggcaaagagtacaagtgcaaggtgtccaacaaggccctggccgctcctatcgagaaaaccatcagcaaggccaagggccagcctcgcgaacctcaagtctgtacactgcctcctagccgggacgagctgaccaagaatcaggtgtcactgagctgcgccgtgaagggcttttaccccagcgacattgccgtggaatgggagagcaatggccagccagagaacaactacaagacaacccctcctgtgctggacagcgacggctcatttttcctggtgtccaagctgacagtggacaagagcagatggcagcagggcaacgtgttcagctgcagcgtgatgcacgaggccctgcacaaccactacacccagaaaagcctgtctctgagccctggc

SEQ ID NO: 46 - DNA, 2166 bp, synthetic construct
  misc_feature 1..2166: note = _
  source 1..2166: mol_type = other DNA
gacatcgtgatgacccagacacctctgagcctgagcgtgacacctggacagcctgccagcatcagctgcaagtctagccagagcctggtgcacaacaacgccaacacctacctgagctggtatctgcagaagcccggccagtctcctcagagcctgatctacaaggtgtccaacagattcagcggcgtgcccgacagattttctggcagcggctctggcaccgacttcaccctgaagatcagcagagtggaagccgaggacgtgggcgtgtactattgtggccagggcacacagtaccccttcacatttggaagcggcaccaaggtggaaatcaaaggcggcagctctggcgacatccagatgacacagagccctagcagcctgtctgccagcgtgggagacagagtgaccattacctgtcaggccagccagaacatctacgtgtggctgaattggtatcagcaaaagcctggcaaggcccctaagctgctcatctataaggccagcaacctgcacaccggcgtgccaagcagattctctggatctggctccggcacagatttcacactgaccataagcagcctgcagcctgaggacattgccacctactactgtcagcagggccagacatacccctacaccttcggccagggaacaaagctcgagatcaaaggtggcggcggaagcggcggatcaggatctggtggcggaggatctgcttctggctctggacaggttcagctggtgcagtctggcgccgaggttgtgaaacctggcgcctccgtgaaggtgtcctgtaaagccagcggctacacctttaccagctactacatccactgggtccgacaggcccctggacaaggacttgagtggatcggcagcatctaccccggcaacgtgaacaccaactacgcccagaagttccagggcagagccactctgacagtggacaccagcatctccaccgcctacatggaactgagccggctgagatccgatgacaccgccgtgtactactgtaccagaagccactacggcctggactggaatttcgacgtgtggggcaagggcaccaccgtgacagttagttctggcggctctagcggccaggtgcagcttgttgaatctggcggaggtgttgtgcagcccggcagaagtctgagactgtcttgtgccgcctccggcttcaccttcacaaaggcctggatgcactgggttcgccaggctccaggcaaacagctggaatgggttgcccagatcaaggacaagagcaacagctacgccacctattacgccgacagcgtgaagggcagattcaccatcagccgggacgacagcaagaacaccctgtacctgcagatgaacagcctgagagccgaggatacagccgtctactattgccggggagtgtactacgctctgagcccctttgattactggggacagggcaccctggtcaccgtgtcctctgcaagcggaggatccggagataagacccacacatgtcctccatgtcctgctccagaggctgctggtggcccttccgtgtttctgttccctccaaagcctaaggacaccctgatgatcagcaggacccctgaagtgacctgcgtggtggtggatgtgtctcacgaggacccagaagtgaagttcaattggtacgtggacggcgtggaagtgcacaacgccaagaccaagcctagagaggaacagtacaacagcacctacagagtggtgtccgtgctgaccgtgctgcaccaggattggctgaacggcaaagagtacaagtgcaaggtgtccaacaaggccctggccgctcctatcgagaaaaccatcagcaaggccaagggccagcctcgcgaacctcaagtctgtacactgcctcctagccgggacgagctgaccaagaatcaggtgtcactgagctgcgccgtgaagggcttttaccccagcgacattgccgtggaatgggagagcaatggccagccagagaacaactacaagacaacccctcctgtgctggacagcgacggctcatttttcctggtgtccaagctgacagtggacaagagcagatggcagcagggcaacgtgttcagctgcagcgtgatgcacgaggccctgcacaaccactacacccagaaaagcctgtctctgagccctggc

SEQ ID NO: 47 - DNA, 2166 bp, synthetic construct
  misc_feature 1..2166: note = _
  source 1..2166: mol_type = other DNA
gacatcgtgatgacccagacacctctgagcctgagcgtgacacctggacagcctgccagcatcagctgcaagtctagccagagcctggtgcacaacaacgccaacacctacctgagctggtatctgcagaagcccggccagtctcctcagagcctgatctacaaggtgtccaacagattcagcggcgtgcccgacagattttctggcagcggctctggcaccgacttcaccctgaagatcagcagagtggaagccgaggacgtgggcgtgtactattgtggccagggcacacagtaccccttcacatttggaagcggcaccaaggtggaaatcaagggcacagtggccgccgacatccagatgacacagagcccttctagcctgtctgccagcgtgggcgacagagtgacaattacctgtcaggccagccagaacatctacgtgtggctgaattggtatcagcaaaagcctggcaaggcccctaagctgctcatctataaggccagcaacctgcacaccggcgtgccaagcagattctctggatctggctccggcacagatttcacactgaccataagcagcctgcagcctgaggacattgccacctactactgtcagcagggccagacatacccctacaccttcggccagggaacaaagctcgagatcaaaggcggcggaggaagcggcggatcaggatctggtggcggaggatctgcttctggctctggacaggttcagctggtgcagtctggcgccgaggttgtgaaacctggcgcctccgtgaaggtgtcctgtaaagccagcggctacacctttaccagctactacatccactgggtccgacaggcccctggacaaggacttgagtggatcggcagcatctaccccggcaacgtgaacaccaactacgcccagaagttccagggcagagccactctgacagtggacaccagcatctccaccgcctacatggaactgagccggctgagatccgatgacaccgccgtgtactactgtaccagaagccactacggcctggactggaatttcgacgtgtggggcaagggcaccaccgtgacagtttctagcgcttctacaggcggccaggtgcagcttgttgaatctggcggaggtgttgtgcagcccggcagaagtctgagactgtcttgtgccgcctccggcttcaccttcacaaaggcctggatgcactgggttcgccaggctccaggcaaacagctggaatgggttgcccagatcaaggacaagagcaacagctacgccacctattacgccgacagcgtgaagggcagattcaccatcagccgggacgacagcaagaacaccctgtacctgcagatgaacagcctgagagccgaggatacagccgtctactattgccggggagtgtactacgctctgagcccctttgattactggggacagggcaccctggtcaccgtgtcctctgcaagcggaggatccggagataagacccacacatgtcctccatgtcctgctccagaggctgctggtggcccttccgtgtttctgttccctccaaagcctaaggacaccctgatgatcagcaggacccctgaagtgacctgcgtggtggtggatgtgtctcacgaggacccagaagtgaagttcaattggtacgtggacggcgtggaagtgcacaacgccaagaccaagcctagagaggaacagtacaacagcacctacagagtggtgtccgtgctgaccgtgctgcaccaggattggctgaacggcaaagagtacaagtgcaaggtgtccaacaaggccctggccgctcctatcgagaaaaccatcagcaaggccaagggccagcctcgcgaacctcaagtctgtacactgcctcctagccgggacgagctgaccaagaatcaggtgtcactgagctgcgccgtgaagggcttttaccccagcgacattgccgtggaatgggagagcaatggccagccagagaacaactacaagacaacccctcctgtgctggacagcgacggctcatttttcctggtgtccaagctgacagtggacaagagcagatggcagcagggcaacgtgttcagctgcagcgtgatgcacgaggccctgcacaaccactacacccagaaaagcctgtctctgagccctggc

SEQ ID NO: 48 - DNA, 2142 bp, synthetic construct
  misc_feature 1..2142: note = _
  source 1..2142: mol_type = other DNA
gacatccagatgacacagagccctagcagcctgtctgccagcgtgggagacagagtgaccatcacatgtcacgccagccagaacatctacgtgtggctgaactggtatcagcagaagcccggcaaggcccctaagctgctgatctacaaggccagcaatctgcacaccggcgtgcccagcagattttctggctctggcagcggcaccgacttcaccctgaccatatctagcctgcagcctgaggacttcgccacctactattgtcagcagggccagacatacccctacacctttggcggcggaacaaaggtggaaatcaagggcggatcttctggagacatccagctgacacagagccctgccatcatgtctgctagccctggcgagaaagtgaccatgacctgtagagccagcagcagcgtgtcctacatgaactggtatcagcagaagtccggcacaagccccaagcggtggatctacgatacaagcaaggtggccagcggcgtgccctacagattttctggctctggcagcggcaccagctacagcctgacaatcagcagcatggaagccgaggatgccgccacctactactgccagcagtggtccagcaatcccctgacatttggagccggcaccaagctggaactgaagggaggcggaggatctggcggatctggaagtggcggcggtggatctgcttctggctctggcgacatcaagctgcagcagtctggcgccgaacttgctagacctggcgcctctgtgaagatgagctgcaagaccagcggctacaccttcaccagatacaccatgcactgggtcaagcagaggcctggacagggactcgagtggatcggctacatcaaccccagcagaggctacaccaactacaaccagaagttcaaggacaaggccacactgaccaccgacaagagcagcagcacagcctacatgcagctgagcagcctgaccagcgaagatagcgccgtgtactactgcgcccggtactacgacgatcactacagcctggattactggggccagggcacaaccctgacagtgtcatctggaggcagctctggccaggttcagctggttcagtctggcgccgaagtgaagaaacctggcgcctctgtgaaggtgtcctgcaaggccagcggctacacctttaccagctactacatccactgggtccgacaggcccctggacaaggactggaatggatcggcagcatctaccccggcaacgtgaacaccaactacaacgagaagttcaaggaccgggccacactgaccgtggacacctctatcagcaccgcctacatggaactgagccggctgagatccgatgataccgccgtgtacttctgcaccagaagccactacggcctggactggaacttcgatgtgtggggccagggcaccaccgtgacagtttcttctgctagtggcggctccggagataagacccacacatgtcctccatgtcctgctccagaggctgctggtggcccttccgtgtttctgttccctccaaagcctaaggacaccctgatgatcagcaggacccctgaagtgacctgcgtggtggtggatgtgtctcacgaggacccagaagtgaagttcaattggtacgtggacggcgtggaagtgcacaacgccaagaccaagcctagagaggaacagtacaacagcacctacagagtggtgtccgtgctgaccgtgctgcaccaggattggctgaacggcaaagagtacaagtgcaaggtgtccaacaaggccctggccgctcctatcgagaaaaccatcagcaaggccaagggccagcctcgcgaacctcaagtctgtacactgcctcctagccgggacgagctgaccaagaatcaggtgtcactgagctgcgccgtgaagggcttttaccccagcgacattgccgtggaatgggagagcaatggccagccagagaacaactacaagacaacccctcctgtgctggacagcgacggctcatttttcctggtgtccaagctgacagtggacaagagcagatggcagcagggcaacgtgttcagctgcagcgtgatgcacgaggccctgcacaaccactacacccagaaaagcctgtctctgagccctggc

SEQ ID NO: 49 - DNA, 2142 bp, synthetic construct
  misc_feature 1..2142: note = _
  source 1..2142: mol_type = other DNA
gacatccagctgacacagagccctgccatcatgtctgctagccctggcgagaaagtgaccatgacctgtagagccagcagcagcgtgtcctacatgaactggtatcagcagaagtccggcacaagccccaagcggtggatctacgatacaagcaaggtggccagcggcgtgccctacagattttctggctctggcagcggcaccagctacagcctgacaatcagcagcatggaagccgaggatgccgccacctactactgccagcagtggtccagcaatcccctgacatttggagccggcaccaagctggaactgaagggcggatcttctggagacatccagatgacacagagccctagcagcctgtctgccagcgtgggagacagagtgaccatcacatgtcacgccagccagaacatctacgtgtggctgaactggtatcagcagaagcccggcaaggcccctaagctgctgatctacaaggccagcaatctgcacaccggcgtgcccagcagattttctggctctggcagcggcaccgacttcaccctgaccatatctagcctgcagcctgaggacttcgccacctactattgtcagcagggccagacatacccctacacctttggcggcggaacaaaggtggaaatcaagggaggcggaggatctggcggatctggaagtggcggcggtggatctgcttctggctctggccaggttcagctggttcagtctggcgccgaagtgaagaaacctggcgcctctgtgaaggtgtcctgcaaggccagcggctacacctttaccagctactacatccactgggtccgacaggcccctggacaaggactggaatggatcggcagcatctaccccggcaacgtgaacaccaactacaacgagaagttcaaggaccgggccacactgaccgtggacacctctatcagcaccgcctacatggaactgagccggctgagatccgatgataccgccgtgtacttctgcaccagaagccactacggcctggactggaacttcgatgtgtggggccagggcaccaccgtgacagtttcttctggaggcagctctggcgacatcaagctgcagcagtctggcgccgaacttgctagacctggcgcctctgtgaagatgagctgcaagaccagcggctacaccttcaccagatacaccatgcactgggtcaagcagaggcctggacagggactcgagtggatcggctacatcaaccccagcagaggctacaccaactacaaccagaagttcaaggacaaggccacactgaccaccgacaagagcagcagcacagcctacatgcagctgagcagcctgaccagcgaagatagcgccgtgtactactgcgcccggtactacgacgatcactacagcctggattactggggccagggcacaaccctgacagtgtcatctgctagtggcggctccggagataagacccacacatgtcctccatgtcctgctccagaggctgctggtggcccttccgtgtttctgttccctccaaagcctaaggacaccctgatgatcagcaggacccctgaagtgacctgcgtggtggtggatgtgtctcacgaggacccagaagtgaagttcaattggtacgtggacggcgtggaagtgcacaacgccaagaccaagcctagagaggaacagtacaacagcacctacagagtggtgtccgtgctgaccgtgctgcaccaggattggctgaacggcaaagagtacaagtgcaaggtgtccaacaaggccctggccgctcctatcgagaaaaccatcagcaaggccaagggccagcctcgcgaacctcaagtctgtacactgcctcctagccgggacgagctgaccaagaatcaggtgtcactgagctgcgccgtgaagggcttttaccccagcgacattgccgtggaatgggagagcaatggccagccagagaacaactacaagacaacccctcctgtgctggacagcgacggctcatttttcctggtgtccaagctgacagtggacaagagcagatggcagcagggcaacgtgttcagctgcagcgtgatgcacgaggccctgcacaaccactacacccagaaaagcctgtctctgagccctggc

SEQ ID NO: 50 - DNA, 2814 bp, synthetic construct
  misc_feature 1..2814: note = _
  source 1..2814: mol_type = other DNA
gacatccagctgacacagagccctgccatcatgagcgcttccccaggcgagaaagtgaccatgacctgtagagccagcagcagcgtgtcctacatgaactggtatcagcagaagtccggcacaagccccaagcggtggatctacgatacaagcaaggtggccagcggcgtgccctacagattttctggctctggcagcggcaccagctacagcctgacaatcagcagcatggaagccgaggatgccgccacctactactgccagcagtggtccagcaatcccctgacatttggagccggcaccaagctggaactgaaaggcggaagctctggcgacattcagatgacccagtctccaagcagcctgagcgcctctgtgggcgacagagtgaccattacatgtcacgccagccagaacatctacgtgtggctcaattggtatcaacaaaagcctggcaaggcccctaagctgctgatctacaaggccagcaatctgcacaccggcgtgccaagcagattcagcggatctggatctggcaccgacttcaccctgaccataagctccctgcagccagaggacttcgccacatattattgtcagcagggccagacatacccctacacctttggcggcggaacaaaggtggaaatcaaaggcggcggaggcagcggaggatctggaagcggaggtggtggatctgctagtggctctggacaggtgcagctggttcagtctggcgccgaagtgaagaaacctggcgcctccgtgaaggtgtcctgcaaggcttctggctacacattcacaagctactacatccactgggtccgacaggcccctggacaaggacttgagtggatcggcagcatctaccccggcaacgtgaacaccaactacaacgagaagttcaaggaccgggccacactgaccgtggacacctctatcagcaccgcctatatggaactgagccggctgagaagcgacgataccgccgtgtacttctgcaccagaagccactacggcctggactggaacttcgatgtgtggggccagggcaccaccgtgacagttagttctggcggatctagcggcgacatcaagctgcagcaaagcggagccgaactggctagacctggcgcaagcgtgaagatgagctgcaagaccagcggctataccttcaccagatacaccatgcactgggtcaagcagaggccaggccaaggcttggaatggattggctacatcaaccccagccggggctacaccaattacaatcaaaagtttaaggataaggccacgctgaccaccgacaagagcagcagcacagcctacatgcagctgtccagcctgaccagcgaagattctgccgtgtattactgcgcccggtactacgacgaccactactccctggattactggggacagggaacaaccctgaccgtgtccagcagaacagtggccgctcctagcgtgttcatcttcccaccttccgacgagcagctgaaaagcggcacagcctctgtcgtgtgcctgctgaacaacttctaccccagagaagccaaggtgcagtggaaggtggacaacgccctgcagagcggcaatagccaagagagcgtgaccgagcaggacagcaaggactccacctatagcctgagcagcaccctgacactgagcaaggccgactacgagaagcacaaagtgtacgcctgcgaagtgacccaccagggcctttctagccctgtgaccaagagcttcaacagaggcgaatgtggcggtggcggaagtggcggctcaggatctggcggaggcggatctgcttcaggttctggagcttcgaccaagggcccatccgtgtttcctctggctcccagcagcaagtctacaagcggaggaacagccgctctgggctgcctggtcaaggattactttcccgagcctgtgaccgtgtcctggaattctggcgctctgacaagcggcgtgcacacctttccagctgtgctgcaaagcagcggcctgtactctctgagcagcgtggtcacagtgcctagctctagcctgggcacccagacctacatctgcaatgtgaaccacaagcctagcaacaccaaggtggacaagaaggtggaacccaagagctgcgataagacccacacatgtcctccatgtcctgctccagaggctgctggtggcccttccgtgtttctgttccctccaaagcctaaggacaccctgatgatcagcaggacccctgaagtgacctgcgtggtggtggatgtgtctcacgaggacccagaagtgaagttcaattggtacgtggacggcgtggaagtgcacaacgccaagaccaagcctagagaggaacagtacaacagcacctacagagtggtgtccgtgctgaccgtgctgcaccaggattggctgaacggcaaagagtacaagtgcaaggtgtccaacaaggccctggccgctcctatcgagaaaaccatcagcaaggccaagggccagcctcgcgaacctcaagtctgtacactgcctcctagccgggacgagctgaccaagaatcaggtgtcactgagctgcgccgtgaagggcttttaccccagcgacattgccgtggaatgggagagcaatggccagccagagaacaactacaagacaacccctcctgtgctggacagcgacggctcatttttcctggtgtccaagctgacagtggacaagagcagatggcagcagggcaacgtgttcagctgcagcgtgatgcacgaggccctgcacaaccactacacccagaaaagcctgtctctgagccctggc

SEQ ID NO: 51 - DNA, 2814 bp, synthetic construct
  misc_feature 1..2814: note = _
  source 1..2814: mol_type = other DNA
gacatccagctgacacagagccctgccatcatgtctgctagccctggcgagaaagtgaccatgacctgtagagccagcagcagcgtgtcctacatgaactggtatcagcagaagtccggcacaagccccaagcggtggatctacgatacaagcaaggtggccagcggcgtgccctacagattttctggctctggcagcggcaccagctacagcctgacaatcagcagcatggaagccgaggatgccgccacctactactgccagcagtggtccagcaatcccctgacatttggagccggcaccaagctggaactgaagggcggatcttctggagacatccagatgacacagagccctagcagcctgtctgccagcgtgggagacagagtgaccatcacatgtcacgccagccagaacatctacgtgtggctgaactggtatcagcagaagcccggcaaggcccctaagctgctgatctacaaggccagcaatctgcacaccggcgtgcccagcagattttctggctctggcagcggcaccgacttcaccctgaccatatctagcctgcagcctgaggacttcgccacctactattgtcagcagggccagacatacccctacacctttggcggcggaacaaaggtggaaatcaagggaggcggaggatctggcggatctggaagtggcggcggtggatctgcttctggctctggccaggttcagctggttcagtctggcgccgaagtgaagaaacctggcgcctctgtgaaggtgtcctgcaaggccagcggctacacctttaccagctactacatccactgggtccgacaggcccctggacaaggactggaatggatcggcagcatctaccccggcaacgtgaacaccaactacaacgagaagttcaaggaccgggccacactgaccgtggacacctctatcagcaccgcctacatggaactgagccggctgagatccgatgataccgccgtgtacttctgcaccagaagccactacggcctggactggaacttcgatgtgtggggccagggcaccaccgtgacagtttcttctggaggcagctctggcgacatcaagctgcagcagtctggcgccgaacttgctagacctggcgcctctgtgaagatgagctgcaagaccagcggctacaccttcaccagatacaccatgcactgggtcaagcagaggcctggacagggactcgagtggatcggctacatcaaccccagcagaggctacaccaactacaaccagaagttcaaggacaaggccacactgaccaccgacaagagcagcagcacagcctacatgcagctgagcagcctgaccagcgaagatagcgccgtgtactactgcgcccggtactacgacgatcactacagcctggattactggggccagggcacaaccctgacagtgtcatctgccagcacaaaggggcccagcgtgttccctctggctcccagcagcaagtctacaagcggaggaacagccgctctgggctgcctggtcaaggattactttcccgagcctgtgacagtgtcctggaactctggcgctctgacatctggcgtgcacacctttccagccgtgctgcaatcttccggcctgtactctctgagcagcgtcgtgacagtgcctagcagctctctgggcacccagacctacatctgcaatgtgaaccacaagcctagcaacaccaaggtggacaagaaggtggaacccaagagctgtggcggtggcggaagtggcggctcaggatctggcggaggcggatctgcttcaggttctggacgtacggtggccgctcccagcgtgttcatcttcccacctagcgacgagcagctgaagtccggcacagcctctgtcgtgtgcctgctgaacaacttctacccccgcgaggccaaagtgcagtggaaggtggacaacgccctgcagagcggcaacagccaggaaagcgtgaccgagcaggacagcaaggactccacctacagcctgagcagcaccctgacactgagcaaggccgactacgagaagcacaaggtgtacgcctgcgaagtgacccaccagggcctgtctagccccgtgaccaagagcttcaaccggggcgagtgtgataagacccacacatgtcctccatgtcctgctccagagctgctgggtggcccttccgtgtttctgttccctccaaagcctaaggacaccctgatgatcagcaggacccctgaagtgacctgcgtggtggtggatgtgtctcacgaggacccagaagtgaagttcaattggtacgtggacggcgtggaagtgcacaacgccaagaccaagcctagagaggaacagtacaacagcacctacagagtggtgtccgtgctgaccgtgctgcaccaggattggctgaacggcaaagagtacaagtgcaaggtgtccaacaaggccctgcccgctcctatcgagaaaaccatcagcaaggccaagggccagcctcgcgaacctcaagtctgtacactgcctcctagccgggacgagctgaccaagaatcaggtgtcactgagctgcgccgtgaagggcttttaccccagcgacattgccgtggaatgggagagcaatggccagccagagaacaactacaagacaacccctcctgtgctggacagcgacggctcatttttcctggtgtccaagctgacagtggacaagagcagatggcagcagggcaacgtgttcagctgcagcgtgatgcacgaggccctgcacaaccactacacccagaaaagcctgtctctgagccctggc

SEQ ID NO: 52 - protein, 9 aa, synthetic construct
  REGION 1..9: note = _
GYTFTSYYI

SEQ ID NO: 53 - protein, 8 aa, synthetic construct
  REGION 1..8: note = _
IYPGNVNT

SEQ ID NO: 54 - protein, 10 aa, synthetic construct
  REGION 1..10: note = _
SHYGLDWNFD

SEQ ID NO: 55 - protein, 9 aa, synthetic construct
  REGION 1..9: note = _
HASQNIYVW

SEQ ID NO: 56 - protein, 7 aa, synthetic construct
  REGION 1..7: note = _
KASNLHT

SEQ ID NO: 57 - protein, 9 aa, synthetic construct
  REGION 1..9: note = _
QQGQTYPYT

SEQ ID NO: 58 - protein, 480 aa, synthetic construct
  REGION 1..480: note = _
DIQMTQSPSSLSASVGDRVTITCHASQNIYVWLNWYQQKPGKAPKLLIYKASNLHTGVPSRFSGSGSGTDFTLTISSLQPEDFATYYCQQGQTYPYTFGGGTKVEIKGDIQLTQSPAIMSASPGEKVTMTCRASSSVSYMNWYQQKSGTSPKRWIYDTSKVASGVPYRFSGSGSGTSYSLTISSMEAEDAATYYCQQWSSNPLTFGAGTKLELKGGGGSGGSGSGGGGSASGSGDIKLQQSGAELARPGASVKMSCKTSGYTFTRYTMHWVKQRPGQGLEWIGYINPSRGYTNYNQKFKDKATLTTDKSSSTAYMQLSSLTSEDSAVYYCARYYDDHYSLDYWGQGTTLTVSSGQVQLVQSGAEVKKPGASVKVSCKASGYTFTSYYIHWVRQAPGQGLEWIGSIYPGNVNTNYNEKFKDRATLTVDTSISTAYMELSRLRSDDTAVYFCTRSHYGLDWNFDVWGQGTTVTVSSASGGSG

SEQ ID NO: 59 - protein, 498 aa, synthetic construct
  REGION 1..498: note = _
DIQMTQSPSSLSASVGDRVTITCHASQNIYVWLNWYQQKPGKAPKLLIYKASNLHTGVPSRFSGSGSGTDFTLTISSLQPEDFATYYCQQGQTYPYTFGGGTKVEIKSGGSGSSGGSDIQLTQSPAIMSASPGEKVTMTCRASSSVSYMNWYQQKSGTSPKRWIYDTSKVASGVPYRFSGSGSGTSYSLTISSMEAEDAATYYCQQWSSNPLTFGAGTKLELKGGGGSGGSGSGGGGSASGSGDIKLQQSGAELARPGASVKMSCKTSGYTFTRYTMHWVKQRPGQGLEWIGYINPSRGYTNYNQKFKDKATLTTDKSSSTAYMQLSSLTSEDSAVYYCARYYDDHYSLDYWGQGTTLTVSSGGSGGSSGSSQVQLVQSGAEVKKPGASVKVSCKASGYTFTSYYIHWVRQAPGQGLEWIGSIYPGNVNTNYNEKFKDRATLTVDTSISTAYMELSRLRSDDTAVYFCTRSHYGLDWNFDVWGQGTTVTVSSASGGSG

SEQ ID NO: 60 - protein, 595 aa, synthetic construct
  REGION 1..595: note = _
DIQMTQSPSSLSASVGDRVTITCHASQNIYVWLNWYQQKPGKAPKLLIYKASNLHTGVPSRFSGSGSGTDFTLTISSLQPEDFATYYCQQGQTYPYTFGGGTKVEIKGGSSGDIQLTQSPAIMSASPGEKVTMTCRASSSVSYMNWYQQKSGTSPKRWIYDTSKVASGVPYRFSGSGSGTSYSLTISSMEAEDAATYYCQQWSSNPLTFGAGTKLELKGGGGSGGSGSGGGGSASGSGDIKLQQSGAELARPGASVKMSCKTSGYTFTRYTMHWVKQRPGQGLEWIGYINPSRGYTNYNQKFKDKATLTTDKSSSTAYMQLSSLTSEDSAVYYCARYYDDHYSLDYWGQGTTLTVSSGGSSGQVQLVQSGAEVKKPGASVKVSCKASGYTFTSYYIHWVRQAPGQGLEWIGSIYPGNVNTNYNEKFKDRATLTVDTSISTAYMELSRLRSDDTAVYFCTRSHYGLDWNFDVWGQGTTVTVSSASTKGPSVFPLAPSSKSTSGGTAALGCLVKDYFPEPVTVSWNSGALTSGVHTFPAVLQSSGLYSLSSVVTVPSSSLGTQTYICNVNHKPSNTKVDKKVEPKSCDKTHTCPPCP

SEQ ID NO: 61 - protein, 595 aa, synthetic construct
  REGION 1..595: note = _
DIQMTQSPSSLSASVGDRVTITCHASQNIYVWLNWYQQKPGKAPKLLIYKASNLHTGVPSRFSGSGSGTDFTLTISSLQPEDFATYYCQQGQTYPYTFGGGTKVEIKGGSSGDIQLTQSPAIMSASPGEKVTMTCRASSSVSYMNWYQQKSGTSPKRWIYDTSKVASGVPYRFSGSGSGTSYSLTISSMEAEDAATYYCQQWSSNPLTFGAGTKLELKGGGGSGGSGSGGGGSASGSGDIKLQQSGAELARPGASVKMSCKTSGYTFTRYTMHWVKQRPGQGLEWIGYINPSRGYTNYNQKFKDKATLTTDKSSSTAYMQLSSLTSEDSAVYYCARYYDDHYSLDYWGQGTTLTVSSGGSSGQVQLVQSGAEVKKPGASVKVSCKASGYTFTSYYIHWVRQAPGQGLEWIGSIYPGNVNTNYNEKFKDRATLTVDTSISTAYMELSRLRSDDTAVYFCTRSHYGLDWNFDVWGQGTTVTVSSASTKGPSVFPLAPSSKSTSGGTAALGCLVKDYFPEPVTVSWNSGALTSGVHTFPAVLQSSGLYSLSSVVTVPSSSLGTQTYICNVNHKPSNTKVDKKVEPKSSDKTHTCPPCP

SEQ ID NO: 62 - protein, 597 aa, synthetic construct
  REGION 1..597: note = _
DIQMTQSPSSLSASVGDRVTITCHASQNIYVWLNWYQQKPGKAPKLLIYKASNLHTGVPSRFSGSGSGTDFTLTISSLQPEDFATYYCQQGQTYPYTFGGGTKVEIKGGSSGDIQLTQSPAIMSASPGEKVTMTCRASSSVSYMNWYQQKSGTSPKRWIYDTSKVASGVPYRFSGSGSGTSYSLTISSMEAEDAATYYCQQWSSNPLTFGAGTKLELKGGGGSGGSGSGGGGSASGSGDIKLQQSGAELARPGASVKMSCKTSGYTFTRYTMHWVKQRPGQGLEWIGYINPSRGYTNYNQKFKDKATLTTDKSSSTAYMQLSSLTSEDSAVYYCARYYDDHYSLDYWGQGTTLTVSSGGSSGQVQLVQSGAEVKKPGASVKVSCKASGYTFTSYYIHWVRQAPGQGLEWIGSIYPGNVNTNYNEKFKDRATLTVDTSISTAYMELSRLRSDDTAVYFCTRSHYGLDWNFDVWGQGTTVTVSSASTKGPSVFPLAPSSKSTSGGTAALGCLVKDYFPEPVTVSWNSGALTSGVHTFPAVLQSSGLYSLSSVVTVPSSSLGTQTYICNVNHKPSNTKVDKKVEPKTPLGDTTHTCPPCP

SEQ ID NO: 63 - protein, 598 aa, synthetic construct
  REGION 1..598: note = _
DIQMTQSPSSLSASVGDRVTITCHASQNIYVWLNWYQQKPGKAPKLLIYKASNLHTGVPSRFSGSGSGTDFTLTISSLQPEDFATYYCQQGQTYPYTFGGGTKVEIKGGSSGDIQLTQSPAIMSASPGEKVTMTCRASSSVSYMNWYQQKSGTSPKRWIYDTSKVASGVPYRFSGSGSGTSYSLTISSMEAEDAATYYCQQWSSNPLTFGAGTKLELKGGGGSGGSGSGGGGSASGSGDIKLQQSGAELARPGASVKMSCKTSGYTFTRYTMHWVKQRPGQGLEWIGYINPSRGYTNYNQKFKDKATLTTDKSSSTAYMQLSSLTSEDSAVYYCARYYDDHYSLDYWGQGTTLTVSSGGSSGQVQLVQSGAEVKKPGASVKVSCKASGYTFTSYYIHWVRQAPGQGLEWIGSIYPGNVNTNYNEKFKDRATLTVDTSISTAYMELSRLRSDDTAVYFCTRSHYGLDWNFDVWGQGTTVTVSSGSSASTKGPSVFPLAPSSKSTSGGTAALGCLVKDYFPEPVTVSWNSGALTSGVHTFPAVLQSSGLYSLSSVVTVPSSSLGTQTYICNVNHKPSNTKVDKKVEPKSCDKTHTCPPCP

SEQ ID NO: 64 - protein, 600 aa, synthetic construct
  REGION 1..600: note = _
DIQMTQSPSSLSASVGDRVTITCHASQNIYVWLNWYQQKPGKAPKLLIYKASNLHTGVPSRFSGSGSGTDFTLTISSLQPEDFATYYCQQGQTYPYTFGGGTKVEIKGGSSGDIQLTQSPAIMSASPGEKVTMTCRASSSVSYMNWYQQKSGTSPKRWIYDTSKVASGVPYRFSGSGSGTSYSLTISSMEAEDAATYYCQQWSSNPLTFGAGTKLELKGGGGSGGSGSGGGGSASGSGDIKLQQSGAELARPGASVKMSCKTSGYTFTRYTMHWVKQRPGQGLEWIGYINPSRGYTNYNQKFKDKATLTTDKSSSTAYMQLSSLTSEDSAVYYCARYYDDHYSLDYWGQGTTLTVSSGGSSGQVQLVQSGAEVKKPGASVKVSCKASGYTFTSYYIHWVRQAPGQGLEWIGSIYPGNVNTNYNEKFKDRATLTVDTSISTAYMELSRLRSDDTAVYFCTRSHYGLDWNFDVWGQGTTVTVSSGSSGSASTKGPSVFPLAPSSKSTSGGTAALGCLVKDYFPEPVTVSWNSGALTSGVHTFPAVLQSSGLYSLSSVVTVPSSSLGTQTYICNVNHKPSNTKVDKKVEPKSCDKTHTCPPCP

SEQ ID NO: 65 - protein, 488 aa, synthetic construct
  REGION 1..488: note = _
DIKLQQSGAELARPGASVKMSCKTSGYTFTRYTMHWVKQRPGQGLEWIGYINPSRGYTNYNQKFKDKATLTTDKSSSTAYMQLSSLTSEDSAVYYCARYYDDHYSLDYWGQGTTLTVSSGGSSGQVQLVQSGAEVKKPGASVKVSCKASGYTFTSYYIHWVRQAPGQGLEWIGSIYPGNVNTNYNEKFKDRATLTVDTSISTAYMELSRLRSDDTAVYFCTRSHYGLDWNFDVWGQGTTVTVSSGGGGSGGSGSGGGGSASGSGDIQMTQSPSSLSASVGDRVTITCHASQNIYVWLNWYQQKPGKAPKLLIYKASNLHTGVPSRFSGSGSGTDFTLTISSLQPEDFATYYCQQGQTYPYTFGGGTKVEIKGGSSGDIQLTQSPAIMSASPGEKVTMTCRASSSVSYMNWYQQKSGTSPKRWIYDTSKVASGVPYRFSGSGSGTSYSLTISSMEAEDAATYYCQQWSSNPLTFGAGTKLELKASGGSG

SEQ ID NO: 66 - protein, 488 aa, synthetic construct
  REGION 1..488: note = _
QVQLVQSGAEVKKPGASVKVSCKASGYTFTSYYIHWVRQAPGQGLEWIGSIYPGNVNTNYNEKFKDRATLTVDTSISTAYMELSRLRSDDTAVYFCTRSHYGLDWNFDVWGQGTTVTVSSGGSSGDIKLQQSGAELARPGASVKMSCKTSGYTFTRYTMHWVKQRPGQGLEWIGYINPSRGYTNYNQKFKDKATLTTDKSSSTAYMQLSSLTSEDSAVYYCARYYDDHYSLDYWGQGTTLTVSSGGGGSGGSGSGGGGSASGSGDIQLTQSPAIMSASPGEKVTMTCRASSSVSYMNWYQQKSGTSPKRWIYDTSKVASGVPYRFSGSGSGTSYSLTISSMEAEDAATYYCQQWSSNPLTFGAGTKLELKGGSSGDIQMTQSPSSLSASVGDRVTITCHASQNIYVWLNWYQQKPGKAPKLLIYKASNLHTGVPSRFSGSGSGTDFTLTISSLQPEDFATYYCQQGQTYPYTFGGGTKVEIKASGGSG

SEQ ID NO: 67 - DNA, 2118 bp, synthetic construct
  misc_feature 1..2118: note = _
  source 1..2118: mol_type = other DNA
gacatccagatgacacagagccctagcagcctgtctgccagcgtgggagacagagtgaccatcacatgtcacgccagccagaacatctacgtgtggctgaactggtatcagcagaagcccggcaaggcccctaagctgctgatctacaaggccagcaatctgcacaccggcgtgcccagcagattttctggctctggcagcggcaccgacttcaccctgaccatatctagcctgcagcctgaggacttcgccacctactattgtcagcagggccagacatacccctacacctttggcggcggaacaaaggtggaaatcaagggagacatccagctgacacagagccctgccatcatgtctgctagccctggcgagaaagtgaccatgacctgtagagccagcagcagcgtgtcctacatgaactggtatcagcagaagtccggcacaagccccaagcggtggatctacgatacaagcaaggtggccagcggcgtgccctacagattttctggctctggcagcggcaccagctacagcctgacaatcagcagcatggaagccgaggatgccgccacctactactgccagcagtggtccagcaatcccctgacatttggagccggcaccaagctggaactgaagggaggcggaggatctggcggatctggaagtggcggcggtggatctgcttctggctctggcgacatcaagctgcagcagtctggcgccgaacttgctagacctggcgcctctgtgaagatgagctgcaagaccagcggctacaccttcaccagatacaccatgcactgggtcaagcagaggcctggacagggactcgagtggatcggctacatcaaccccagcagaggctacaccaactacaaccagaagttcaaggacaaggccacactgaccaccgacaagagcagcagcacagcctacatgcagctgagcagcctgaccagcgaagatagcgccgtgtactactgcgcccggtactacgacgatcactacagcctggattactggggccagggcacaaccctgacagtgtcatctggacaggttcagctggttcagtctggcgccgaagtgaagaaacctggcgcctctgtgaaggtgtcctgcaaggccagcggctacacctttaccagctactacatccactgggtccgacaggcccctggacaaggactggaatggatcggcagcatctaccccggcaacgtgaacaccaactacaacgagaagttcaaggaccgggccacactgaccgtggacacctctatcagcaccgcctacatggaactgagccggctgagatccgatgataccgccgtgtacttctgcaccagaagccactacggcctggactggaacttcgatgtgtggggccagggcaccaccgtgacagtttcttctgctagtggcggctccggagataagacccacacatgtcctccatgtcctgctccagaggctgctggtggcccttccgtgtttctgttccctccaaagcctaaggacaccctgatgatcagcaggacccctgaagtgacctgcgtggtggtggatgtgtctcacgaggacccagaagtgaagttcaattggtacgtggacggcgtggaagtgcacaacgccaagaccaagcctagagaggaacagtacaacagcacctacagagtggtgtccgtgctgaccgtgctgcaccaggattggctgaacggcaaagagtacaagtgcaaggtgtccaacaaggccctggccgctcctatcgagaaaaccatcagcaaggccaagggccagcctcgcgaacctcaagtctgtacactgcctcctagccgggacgagctgaccaagaatcaggtgtcactgagctgcgccgtgaagggcttttaccccagcgacattgccgtggaatgggagagcaatggccagccagagaacaactacaagacaacccctcctgtgctggacagcgacggctcatttttcctggtgtccaagctgacagtggacaagagcagatggcagcagggcaacgtgttcagctgcagcgtgatgcacgaggccctgcacaaccactacacccagaaaagcctgtctctgagccctggc

SEQ ID NO: 68 - DNA, 2172 bp, synthetic construct
  misc_feature 1..2172: note = _
  source 1..2172: mol_type = other DNA
gacatccagatgacacagagccctagcagcctgtctgccagcgtgggagacagagtgaccatcacatgtcacgccagccagaacatctacgtgtggctgaactggtatcagcagaagcccggcaaggcccctaagctgctgatctacaaggccagcaatctgcacaccggcgtgcccagcagattttctggctctggcagcggcaccgacttcaccctgaccatatctagcctgcagcctgaggacttcgccacctactattgtcagcagggccagacatacccctacacctttggcggcggaacaaaggtggaaatcaagtctggcggaagtggatctagcggcggctctgacatccagctgacacagagccctgccatcatgtctgctagccctggcgagaaagtgaccatgacctgtagagccagcagcagcgtgtcctacatgaactggtatcagcagaagtccggcacaagccccaagcggtggatctacgatacaagcaaggtggccagcggcgtgccctacagattttctggctctggcagcggcaccagctacagcctgacaatcagcagcatggaagccgaggatgccgccacctactactgccagcagtggtccagcaatcccctgacatttggagccggcaccaagctggaactgaagggaggcggaggatctggcggatctggaagtggcggcggtggatctgcttctggctctggcgacatcaagctgcagcagtctggcgccgaacttgctagacctggcgcctctgtgaagatgagctgcaagaccagcggctacaccttcaccagatacaccatgcactgggtcaagcagaggcctggacagggactcgagtggatcggctacatcaaccccagcagaggctacaccaactacaaccagaagttcaaggacaaggccacactgaccaccgacaagagcagcagcacagcctacatgcagctgagcagcctgaccagcgaagatagcgccgtgtactactgcgcccggtactacgacgatcactacagcctggattactggggccagggcacaaccctgacagtgtcatctggtggaagcggcggaagctctggcagcagccaggttcagctggttcagtctggcgccgaagtgaagaaacctggcgcctctgtgaaggtgtcctgcaaggccagcggctacacctttaccagctactacatccactgggtccgacaggcccctggacaaggactggaatggatcggcagcatctaccccggcaacgtgaacaccaactacaacgagaagttcaaggaccgggccacactgaccgtggacacctctatcagcaccgcctacatggaactgagccggctgagatccgatgataccgccgtgtacttctgcaccagaagccactacggcctggactggaacttcgatgtgtggggccagggcaccaccgtgacagtttcttctgctagtggcggctccggagataagacccacacatgtcctccatgtcctgctccagaggctgctggtggcccttccgtgtttctgttccctccaaagcctaaggacaccctgatgatcagcaggacccctgaagtgacctgcgtggtggtggatgtgtctcacgaggacccagaagtgaagttcaattggtacgtggacggcgtggaagtgcacaacgccaagaccaagcctagagaggaacagtacaacagcacctacagagtggtgtccgtgctgaccgtgctgcaccaggattggctgaacggcaaagagtacaagtgcaaggtgtccaacaaggccctggccgctcctatcgagaaaaccatcagcaaggccaagggccagcctcgcgaacctcaagtctgtacactgcctcctagccgggacgagctgaccaagaatcaggtgtcactgagctgcgccgtgaagggcttttaccccagcgacattgccgtggaatgggagagcaatggccagccagagaacaactacaagacaacccctcctgtgctggacagcgacggctcatttttcctggtgtccaagctgacagtggacaagagcagatggcagcagggcaacgtgttcagctgcagcgtgatgcacgaggccctgcacaaccactacacccagaaaagcctgtctctgagccctggc

SEQ ID NO: 69 - DNA, 2433 bp, synthetic construct
  misc_feature 1..2433: note = _
  source 1..2433: mol_type = other DNA
gacatccagatgacacagagccctagcagcctgtctgccagcgtgggagacagagtgaccatcacatgtcacgccagccagaacatctacgtgtggctgaactggtatcagcagaagcccggcaaggcccctaagctgctgatctacaaggccagcaatctgcacaccggcgtgcccagcagattttctggctctggcagcggcaccgacttcaccctgaccatatctagcctgcagcctgaggacttcgccacctactattgtcagcagggccagacatacccctacacctttggcggcggaacaaaggtggaaatcaagggcggatcttctggagacatccagctgacacagagccctgccatcatgtctgctagccctggcgagaaagtgaccatgacctgtagagccagcagcagcgtgtcctacatgaactggtatcagcagaagtccggcacaagccccaagcggtggatctacgatacaagcaaggtggccagcggcgtgccctacagattttctggctctggcagcggcaccagctacagcctgacaatcagcagcatggaagccgaggatgccgccacctactactgccagcagtggtccagcaatcccctgacatttggagccggcaccaagctggaactgaagggaggcggaggatctggcggatctggaagtggcggcggtggatctgcttctggctctggcgacatcaagctgcagcagtctggcgccgaacttgctagacctggcgcctctgtgaagatgagctgcaagaccagcggctacaccttcaccagatacaccatgcactgggtcaagcagaggcctggacagggactcgagtggatcggctacatcaaccccagcagaggctacaccaactacaaccagaagttcaaggacaaggccacactgaccaccgacaagagcagcagcacagcctacatgcagctgagcagcctgaccagcgaagatagcgccgtgtactactgcgcccggtactacgacgatcactacagcctggattactggggccagggcacaaccctgacagtgtcatctggaggcagctctggccaggttcagctggttcagtctggcgccgaagtgaagaaacctggcgcctctgtgaaggtgtcctgcaaggccagcggctacacctttaccagctactacatccactgggtccgacaggcccctggacaaggactggaatggatcggcagcatctaccccggcaacgtgaacaccaactacaacgagaagttcaaggaccgggccacactgaccgtggacacctctatcagcaccgcctacatggaactgagccggctgagatccgatgataccgccgtgtacttctgcaccagaagccactacggcctggactggaacttcgatgtgtggggccagggcaccaccgtgacagtttcttctgcttcgaccaagggcccatccgtgtttcctctggctcccagcagcaagtctacaagcggaggaacagccgctctgggctgcctggtcaaggattactttcccgagcctgtgaccgtgtcctggaattctggcgctctgacaagcggcgtgcacacctttccagctgtgctgcaaagcagcggcctgtactctctgagcagcgtggtcacagtgcctagctctagcctgggcacccagacctacatctgcaatgtgaaccacaagcctagcaacaccaaggtggacaagaaggtggaacccaagagctgcgataagacccacacatgtcctccatgtcctgctccagaggctgctggtggcccttccgtgtttctgttccctccaaagcctaaggacaccctgatgatcagcaggacccctgaagtgacctgcgtggtggtggatgtgtctcacgaggacccagaagtgaagttcaattggtacgtggacggcgtggaagtgcacaacgccaagaccaagcctagagaggaacagtacaacagcacctacagagtggtgtccgtgctgaccgtgctgcaccaggattggctgaacggcaaagagtacaagtgcaaggtgtccaacaaggccctggccgctcctatcgagaaaaccatcagcaaggccaagggccagcctcgcgaacctcaagtctgtacactgcctcctagccgggacgagctgaccaagaatcaggtgtcactgagctgcgccgtgaagggcttttaccccagcgacattgccgtggaatgggagagcaatggccagccagagaacaactacaagacaacccctcctgtgctggacagcgacggctcatttttcctggtgtccaagctgacagtggacaagagcagatggcagcagggcaacgtgttcagctgcagcgtgatgcacgaggccctgcacaaccactacacccagaaaagcctgtctctgagccctggc

SEQ ID NO: 70 - DNA, 2433 bp, synthetic construct
  misc_feature 1..2433: note = _
  source 1..2433: mol_type = other DNA
gacatccagatgacacagagccctagcagcctgtctgccagcgtgggagacagagtgaccatcacatgtcacgccagccagaacatctacgtgtggctgaactggtatcagcagaagcccggcaaggcccctaagctgctgatctacaaggccagcaatctgcacaccggcgtgcccagcagattttctggctctggcagcggcaccgacttcaccctgaccatatctagcctgcagcctgaggacttcgccacctactattgtcagcagggccagacatacccctacacctttggcggcggaacaaaggtggaaatcaagggcggatcttctggagacatccagctgacacagagccctgccatcatgtctgctagccctggcgagaaagtgaccatgacctgtagagccagcagcagcgtgtcctacatgaactggtatcagcagaagtccggcacaagccccaagcggtggatctacgatacaagcaaggtggccagcggcgtgccctacagattttctggctctggcagcggcaccagctacagcctgacaatcagcagcatggaagccgaggatgccgccacctactactgccagcagtggtccagcaatcccctgacatttggagccggcaccaagctggaactgaagggaggcggaggatctggcggatctggaagtggcggcggtggatctgcttctggctctggcgacatcaagctgcagcagtctggcgccgaacttgctagacctggcgcctctgtgaagatgagctgcaagaccagcggctacaccttcaccagatacaccatgcactgggtcaagcagaggcctggacagggactcgagtggatcggctacatcaaccccagcagaggctacaccaactacaaccagaagttcaaggacaaggccacactgaccaccgacaagagcagcagcacagcctacatgcagctgagcagcctgaccagcgaagatagcgccgtgtactactgcgcccggtactacgacgatcactacagcctggattactggggccagggcacaaccctgacagtgtcatctggaggcagctctggccaggttcagctggttcagtctggcgccgaagtgaagaaacctggcgcctctgtgaaggtgtcctgcaaggccagcggctacacctttaccagctactacatccactgggtccgacaggcccctggacaaggactggaatggatcggcagcatctaccccggcaacgtgaacaccaactacaacgagaagttcaaggaccgggccacactgaccgtggacacctctatcagcaccgcctacatggaactgagccggctgagatccgatgataccgccgtgtacttctgcaccagaagccactacggcctggactggaacttcgatgtgtggggccagggcaccaccgtgacagtttcttctgcttcgaccaagggcccatccgtgtttcctctggctcccagcagcaagtctacaagcggaggaacagccgctctgggctgcctggtcaaggattactttcccgagcctgtgaccgtgtcctggaattctggcgctctgacaagcggcgtgcacacctttccagctgtgctgcaaagcagcggcctgtactctctgagcagcgtggtcacagtgcctagctctagcctgggcacccagacctacatctgcaatgtgaaccacaagcctagcaacaccaaggtggacaagaaggtggaacccaagagcagtgataagacccacacatgtcctccatgtcctgctccagaggctgctggtggcccttccgtgtttctgttccctccaaagcctaaggacaccctgatgatcagcaggacccctgaagtgacctgcgtggtggtggatgtgtctcacgaggacccagaagtgaagttcaattggtacgtggacggcgtggaagtgcacaacgccaagaccaagcctagagaggaacagtacaacagcacctacagagtggtgtccgtgctgaccgtgctgcaccaggattggctgaacggcaaagagtacaagtgcaaggtgtccaacaaggccctggccgctcctatcgagaaaaccatcagcaaggccaagggccagcctcgcgaacctcaagtctgtacactgcctcctagccgggacgagctgaccaagaatcaggtgtcactgagctgcgccgtgaagggcttttaccccagcgacattgccgtggaatgggagagcaatggccagccagagaacaactacaagacaacccctcctgtgctggacagcgacggctcatttttcctggtgtccaagctgacagtggacaagagcagatggcagcagggcaacgtgttcagctgcagcgtgatgcacgaggccctgcacaaccactacacccagaaaagcctgtctctgagccctggc

SEQ ID NO: 71 - DNA, 2439 bp, synthetic construct
  misc_feature 1..2439: note = _
  source 1..2439: mol_type = other DNA
gacatccagatgacacagagccctagcagcctgtctgccagcgtgggagacagagtgaccatcacatgtcacgccagccagaacatctacgtgtggctgaactggtatcagcagaagcccggcaaggcccctaagctgctgatctacaaggccagcaatctgcacaccggcgtgcccagcagattttctggctctggcagcggcaccgacttcaccctgaccatatctagcctgcagcctgaggacttcgccacctactattgtcagcagggccagacatacccctacacctttggcggcggaacaaaggtggaaatcaagggcggatcttctggagacatccagctgacacagagccctgccatcatgtctgctagccctggcgagaaagtgaccatgacctgtagagccagcagcagcgtgtcctacatgaactggtatcagcagaagtccggcacaagccccaagcggtggatctacgatacaagcaaggtggccagcggcgtgccctacagattttctggctctggcagcggcaccagctacagcctgacaatcagcagcatggaagccgaggatgccgccacctactactgccagcagtggtccagcaatcccctgacatttggagccggcaccaagctggaactgaagggaggcggaggatctggcggatctggaagtggcggcggtggatctgcttctggctctggcgacatcaagctgcagcagtctggcgccgaacttgctagacctggcgcctctgtgaagatgagctgcaagaccagcggctacaccttcaccagatacaccatgcactgggtcaagcagaggcctggacagggactcgagtggatcggctacatcaaccccagcagaggctacaccaactacaaccagaagttcaaggacaaggccacactgaccaccgacaagagcagcagcacagcctacatgcagctgagcagcctgaccagcgaagatagcgccgtgtactactgcgcccggtactacgacgatcactacagcctggattactggggccagggcacaaccctgacagtgtcatctggaggcagctctggccaggttcagctggttcagtctggcgccgaagtgaagaaacctggcgcctctgtgaaggtgtcctgcaaggccagcggctacacctttaccagctactacatccactgggtccgacaggcccctggacaaggactggaatggatcggcagcatctaccccggcaacgtgaacaccaactacaacgagaagttcaaggaccgggccacactgaccgtggacacctctatcagcaccgcctacatggaactgagccggctgagatccgatgataccgccgtgtacttctgcaccagaagccactacggcctggactggaacttcgatgtgtggggccagggcaccaccgtgacagtttcttctgcttcgaccaagggcccatccgtgtttcctctggctcccagcagcaagtctacaagcggaggaacagccgctctgggctgcctggtcaaggattactttcccgagcctgtgaccgtgtcctggaattctggcgctctgacaagcggcgtgcacacctttccagctgtgctgcaaagcagcggcctgtactctctgagcagcgtggtcacagtgcctagctctagcctgggcacccagacctacatctgcaatgtgaaccacaagcctagcaacaccaaggtggacaagaaggtggaacccaagacacctctgggagatactacccacacatgtcctccatgtcctgctccagaggctgctggtggcccttccgtgtttctgttccctccaaagcctaaggacaccctgatgatcagcaggacccctgaagtgacctgcgtggtggtggatgtgtctcacgaggacccagaagtgaagttcaattggtacgtggacggcgtggaagtgcacaacgccaagaccaagcctagagaggaacagtacaacagcacctacagagtggtgtccgtgctgaccgtgctgcaccaggattggctgaacggcaaagagtacaagtgcaaggtgtccaacaaggccctggccgctcctatcgagaaaaccatcagcaaggccaagggccagcctcgcgaacctcaagtctgtacactgcctcctagccgggacgagctgaccaagaatcaggtgtcactgagctgcgccgtgaagggcttttaccccagcgacattgccgtggaatgggagagcaatggccagccagagaacaactacaagacaacccctcctgtgctggacagcgacggctcatttttcctggtgtccaagctgacagtggacaagagcagatggcagcagggcaacgtgttcagctgcagcgtgatgcacgaggccctgcacaaccactacacccagaaaagcctgtctctgagccctggc

SEQ ID NO: 72 - DNA, 2442 bp, synthetic construct
  misc_feature 1..2442: note = _
  source 1..2442: mol_type = other DNA
gacatccagatgacacagagccctagcagcctgtctgccagcgtgggagacagagtgaccatcacatgtcacgccagccagaacatctacgtgtggctgaactggtatcagcagaagcccggcaaggcccctaagctgctgatctacaaggccagcaatctgcacaccggcgtgcccagcagattttctggctctggcagcggcaccgacttcaccctgaccatatctagcctgcagcctgaggacttcgccacctactattgtcagcagggccagacatacccctacacctttggcggcggaacaaaggtggaaatcaagggcggatcttctggagacatccagctgacacagagccctgccatcatgtctgctagccctggcgagaaagtgaccatgacctgtagagccagcagcagcgtgtcctacatgaactggtatcagcagaagtccggcacaagccccaagcggtggatctacgatacaagcaaggtggccagcggcgtgccctacagattttctggctctggcagcggcaccagctacagcctgacaatcagcagcatggaagccgaggatgccgccacctactactgccagcagtggtccagcaatcccctgacatttggagccggcaccaagctggaactgaagggaggcggaggatctggcggatctggaagtggcggcggtggatctgcttctggctctggcgacatcaagctgcagcagtctggcgccgaacttgctagacctggcgcctctgtgaagatgagctgcaagaccagcggctacaccttcaccagatacaccatgcactgggtcaagcagaggcctggacagggactcgagtggatcggctacatcaaccccagcagaggctacaccaactacaaccagaagttcaaggacaaggccacactgaccaccgacaagagcagcagcacagcctacatgcagctgagcagcctgaccagcgaagatagcgccgtgtactactgcgcccggtactacgacgatcactacagcctggattactggggccagggcacaaccctgacagtgtcatctggaggcagctctggccaggttcagctggttcagtctggcgccgaagtgaagaaacctggcgcctctgtgaaggtgtcctgcaaggccagcggctacacctttaccagctactacatccactgggtccgacaggcccctggacaaggactggaatggatcggcagcatctaccccggcaacgtgaacaccaactacaacgagaagttcaaggaccgggccacactgaccgtggacacctctatcagcaccgcctacatggaactgagccggctgagatccgatgataccgccgtgtacttctgcaccagaagccactacggcctggactggaacttcgatgtgtggggccagggcaccaccgtgacagtttcttctggatcttccgcttcgaccaagggcccatccgtgtttcctctggctcccagcagcaagtctacaagcggaggaacagccgctctgggctgcctggtcaaggattactttcccgagcctgtgaccgtgtcctggaattctggcgctctgacaagcggcgtgcacacctttccagctgtgctgcaaagcagcggcctgtactctctgagcagcgtggtcacagtgcctagctctagcctgggcacccagacctacatctgcaatgtgaaccacaagcctagcaacaccaaggtggacaagaaggtggaacccaagagctgcgataagacccacacatgtcctccatgtcctgctccagaggctgctggtggcccttccgtgtttctgttccctccaaagcctaaggacaccctgatgatcagcaggacccctgaagtgacctgcgtggtggtggatgtgtctcacgaggacccagaagtgaagttcaattggtacgtggacggcgtggaagtgcacaacgccaagaccaagcctagagaggaacagtacaacagcacctacagagtggtgtccgtgctgaccgtgctgcaccaggattggctgaacggcaaagagtacaagtgcaaggtgtccaacaaggccctggccgctcctatcgagaaaaccatcagcaaggccaagggccagcctcgcgaacctcaagtctgtacactgcctcctagccgggacgagctgaccaagaatcaggtgtcactgagctgcgccgtgaagggcttttaccccagcgacattgccgtggaatgggagagcaatggccagccagagaacaactacaagacaacccctcctgtgctggacagcgacggctcatttttcctggtgtccaagctgacagtggacaagagcagatggcagcagggcaacgtgttcagctgcagcgtgatgcacgaggccctgcacaaccactacacccagaaaagcctgtctctgagccctggc

SEQ ID NO: 73 - DNA, 2448 bp, synthetic construct
  misc_feature 1..2448: note = _
  source 1..2448: mol_type = other DNA
gacatccagatgacacagagccctagcagcctgtctgccagcgtgggagacagagtgaccatcacatgtcacgccagccagaacatctacgtgtggctgaactggtatcagcagaagcccggcaaggcccctaagctgctgatctacaaggccagcaatctgcacaccggcgtgcccagcagattttctggctctggcagcggcaccgacttcaccctgaccatatctagcctgcagcctgaggacttcgccacctactattgtcagcagggccagacatacccctacacctttggcggcggaacaaaggtggaaatcaagggcggatcttctggagacatccagctgacacagagccctgccatcatgtctgctagccctggcgagaaagtgaccatgacctgtagagccagcagcagcgtgtcctacatgaactggtatcagcagaagtccggcacaagccccaagcggtggatctacgatacaagcaaggtggccagcggcgtgccctacagattttctggctctggcagcggcaccagctacagcctgacaatcagcagcatggaagccgaggatgccgccacctactactgccagcagtggtccagcaatcccctgacatttggagccggcaccaagctggaactgaagggaggcggaggatctggcggatctggaagtggcggcggtggatctgcttctggctctggcgacatcaagctgcagcagtctggcgccgaacttgctagacctggcgcctctgtgaagatgagctgcaagaccagcggctacaccttcaccagatacaccatgcactgggtcaagcagaggcctggacagggactcgagtggatcggctacatcaaccccagcagaggctacaccaactacaaccagaagttcaaggacaaggccacactgaccaccgacaagagcagcagcacagcctacatgcagctgagcagcctgaccagcgaagatagcgccgtgtactactgcgcccggtactacgacgatcactacagcctggattactggggccagggcacaaccctgacagtgtcatctggaggcagctctggccaggttcagctggttcagtctggcgccgaagtgaagaaacctggcgcctctgtgaaggtgtcctgcaaggccagcggctacacctttaccagctactacatccactgggtccgacaggcccctggacaaggactggaatggatcggcagcatctaccccggcaacgtgaacaccaactacaacgagaagttcaaggaccgggccacactgaccgtggacacctctatcagcaccgcctacatggaactgagccggctgagatccgatgataccgccgtgtacttctgcaccagaagccactacggcctggactggaacttcgatgtgtggggccagggcaccaccgtgacagtttcttctggctctagcggtagtgcttcgaccaagggcccatccgtgtttcctctggctcccagcagcaagtctacaagcggaggaacagccgctctgggctgcctggtcaaggattactttcccgagcctgtgaccgtgtcctggaattctggcgctctgacaagcggcgtgcacacctttccagctgtgctgcaaagcagcggcctgtactctctgagcagcgtggtcacagtgcctagctctagcctgggcacccagacctacatctgcaatgtgaaccacaagcctagcaacaccaaggtggacaagaaggtggaacccaagagctgcgataagacccacacatgtcctccatgtcctgctccagaggctgctggtggcccttccgtgtttctgttccctccaaagcctaaggacaccctgatgatcagcaggacccctgaagtgacctgcgtggtggtggatgtgtctcacgaggacccagaagtgaagttcaattggtacgtggacggcgtggaagtgcacaacgccaagaccaagcctagagaggaacagtacaacagcacctacagagtggtgtccgtgctgaccgtgctgcaccaggattggctgaacggcaaagagtacaagtgcaaggtgtccaacaaggccctggccgctcctatcgagaaaaccatcagcaaggccaagggccagcctcgcgaacctcaagtctgtacactgcctcctagccgggacgagctgaccaagaatcaggtgtcactgagctgcgccgtgaagggcttttaccccagcgacattgccgtggaatgggagagcaatggccagccagagaacaactacaagacaacccctcctgtgctggacagcgacggctcatttttcctggtgtccaagctgacagtggacaagagcagatggcagcagggcaacgtgttcagctgcagcgtgatgcacgaggccctgcacaaccactacacccagaaaagcctgtctctgagccctggc

SEQ ID NO: 74 - DNA, 2142 bp, synthetic construct
  misc_feature 1..2142: note = _
  source 1..2142: mol_type = other DNA
gacatcaagctgcagcagtctggcgccgaacttgctagacctggcgcctctgtgaagatgagctgcaagaccagcggctacaccttcaccagatacaccatgcactgggtcaagcagaggcctggacagggactcgagtggatcggctacatcaaccccagcagaggctacaccaactacaaccagaagttcaaggacaaggccacactgaccaccgacaagagcagcagcacagcctacatgcagctgagcagcctgaccagcgaagatagcgccgtgtactactgcgcccggtactacgacgatcactacagcctggattactggggccagggcacaaccctgacagtgtcatctggcggatcttctggacaggttcagctggttcagtctggcgccgaagtgaagaaacctggcgcctctgtgaaggtgtcctgcaaggccagcggctacacctttaccagctactacatccactgggtccgacaggcccctggacaaggactggaatggatcggcagcatctaccccggcaacgtgaacaccaactacaacgagaagttcaaggaccgggccacactgaccgtggacacctctatcagcaccgcctacatggaactgagccggctgagatccgatgataccgccgtgtacttctgcaccagaagccactacggcctggactggaacttcgatgtgtggggccagggcaccaccgtgacagtttcttctggaggcggaggatctggcggatctggaagtggcggcggtggatctgcttctggctctggcgacatccagatgacacagagccctagcagcctgtctgccagcgtgggagacagagtgaccatcacatgtcacgccagccagaacatctacgtgtggctgaactggtatcagcagaagcccggcaaggcccctaagctgctgatctacaaggccagcaatctgcacaccggcgtgcccagcagattttctggctctggcagcggcaccgacttcaccctgaccatatctagcctgcagcctgaggacttcgccacctactattgtcagcagggccagacatacccctacacctttggcggcggaacaaaggtggaaatcaagggaggcagctctggcgacatccagctgacacagagccctgccatcatgtctgctagccctggcgagaaagtgaccatgacctgtagagccagcagcagcgtgtcctacatgaactggtatcagcagaagtccggcacaagccccaagcggtggatctacgatacaagcaaggtggccagcggcgtgccctacagattttctggctctggcagcggcaccagctacagcctgacaatcagcagcatggaagccgaggatgccgccacctactactgccagcagtggtccagcaatcccctgacatttggagccggcaccaagctggaactgaaggctagtggcggctccggagataagacccacacatgtcctccatgtcctgctccagaggctgctggtggcccttccgtgtttctgttccctccaaagcctaaggacaccctgatgatcagcaggacccctgaagtgacctgcgtggtggtggatgtgtctcacgaggacccagaagtgaagttcaattggtacgtggacggcgtggaagtgcacaacgccaagaccaagcctagagaggaacagtacaacagcacctacagagtggtgtccgtgctgaccgtgctgcaccaggattggctgaacggcaaagagtacaagtgcaaggtgtccaacaaggccctggccgctcctatcgagaaaaccatcagcaaggccaagggccagcctcgcgaacctcaagtctgtacactgcctcctagccgggacgagctgaccaagaatcaggtgtcactgagctgcgccgtgaagggcttttaccccagcgacattgccgtggaatgggagagcaatggccagccagagaacaactacaagacaacccctcctgtgctggacagcgacggctcatttttcctggtgtccaagctgacagtggacaagagcagatggcagcagggcaacgtgttcagctgcagcgtgatgcacgaggccctgcacaaccactacacccagaaaagcctgtctctgagccctggc

SEQ ID NO: 75 - DNA, 2142 bp, synthetic construct
  misc_feature 1..2142: note = _
  source 1..2142: mol_type = other DNA
caggttcagctggttcagtctggcgccgaagtgaagaaacctggcgcctctgtgaaggtgtcctgcaaggccagcggctacacctttaccagctactacatccactgggtccgacaggcccctggacaaggactggaatggatcggcagcatctaccccggcaacgtgaacaccaactacaacgagaagttcaaggaccgggccacactgaccgtggacacctctatcagcaccgcctacatggaactgagccggctgagatccgatgataccgccgtgtacttctgcaccagaagccactacggcctggactggaacttcgatgtgtggggccagggcaccaccgtgacagtttcttctggcggatcttctggagacatcaagctgcagcagtctggcgccgaacttgctagacctggcgcctctgtgaagatgagctgcaagaccagcggctacaccttcaccagatacaccatgcactgggtcaagcagaggcctggacagggactcgagtggatcggctacatcaaccccagcagaggctacaccaactacaaccagaagttcaaggacaaggccacactgaccaccgacaagagcagcagcacagcctacatgcagctgagcagcctgaccagcgaagatagcgccgtgtactactgcgcccggtactacgacgatcactacagcctggattactggggccagggcacaaccctgacagtgtcatctggaggcggaggatctggcggatctggaagtggcggcggtggatctgcttctggctctggcgacatccagctgacacagagccctgccatcatgtctgctagccctggcgagaaagtgaccatgacctgtagagccagcagcagcgtgtcctacatgaactggtatcagcagaagtccggcacaagccccaagcggtggatctacgatacaagcaaggtggccagcggcgtgccctacagattttctggctctggcagcggcaccagctacagcctgacaatcagcagcatggaagccgaggatgccgccacctactactgccagcagtggtccagcaatcccctgacatttggagccggcaccaagctggaactgaagggaggcagctctggcgacatccagatgacacagagccctagcagcctgtctgccagcgtgggagacagagtgaccatcacatgtcacgccagccagaacatctacgtgtggctgaactggtatcagcagaagcccggcaaggcccctaagctgctgatctacaaggccagcaatctgcacaccggcgtgcccagcagattttctggctctggcagcggcaccgacttcaccctgaccatatctagcctgcagcctgaggacttcgccacctactattgtcagcagggccagacatacccctacacctttggcggcggaacaaaggtggaaatcaaggctagtggcggctccggagataagacccacacatgtcctccatgtcctgctccagaggctgctggtggcccttccgtgtttctgttccctccaaagcctaaggacaccctgatgatcagcaggacccctgaagtgacctgcgtggtggtggatgtgtctcacgaggacccagaagtgaagttcaattggtacgtggacggcgtggaagtgcacaacgccaagaccaagcctagagaggaacagtacaacagcacctacagagtggtgtccgtgctgaccgtgctgcaccaggattggctgaacggcaaagagtacaagtgcaaggtgtccaacaaggccctggccgctcctatcgagaaaaccatcagcaaggccaagggccagcctcgcgaacctcaagtctgtacactgcctcctagccgggacgagctgaccaagaatcaggtgtcactgagctgcgccgtgaagggcttttaccccagcgacattgccgtggaatgggagagcaatggccagccagagaacaactacaagacaacccctcctgtgctggacagcgacggctcatttttcctggtgtccaagctgacagtggacaagagcagatggcagcagggcaacgtgttcagctgcagcgtgatgcacgaggccctgcacaaccactacacccagaaaagcctgtctctgagccctggc

SEQ ID NO: 76 - protein, 120 aa, synthetic construct
  REGION 1..120: note = _
QVQLVQSGAEVVKPGASVKVSCKASGYTFTSYAMHWVKEAPGQRLEWIGYIYPGQGGTNYNQKFQGRATLTADTSASTAYMELSSLRSEDTAVYFCARTGGLRRAYFTYWGQGTLVTVSS

SEQ ID NO: 77 - protein, 111 aa, synthetic construct
  REGION 1..111: note = _
DIVLTQSPATLSLSPGERATISCRASQSVSSYGQGFMHWYQQKPGQPPRLLIYGASSRATGIPARFSGSGSGTDFTLTISPLEPEDFAVYYCQQNKEDPWTFGGGTKLEIK

SEQ ID NO: 78 - protein, 483 aa, synthetic construct
  REGION 1..483: note = _
DIVLTQSPATLSLSPGERATISCRASQSVSSYGQGFMHWYQQKPGQPPRLLIYGASSRATGIPARFSGSGSGTDFTLTISPLEPEDFAVYYCQQNKEDPWTFGGGTKLEIKGGGGSGGSGSGGGGSASGSGQVQLVQSGAEVVKPGASVKVSCKASGYTFTSYAMHWVKEAPGQRLEWIGYIYPGQGGTNYNQKFQGRATLTADTSASTAYMELSSLRSEDTAVYFCARTGGLRRAYFTYWGQGTLVTVSSASGGSGDKTHTCPPCPAPEAAGGPSVFLFPPKPKDTLMISRTPEVTCVVVDVSHEDPEVKFNWYVDGVEVHNAKTKPREEQYNSTYRVVSVLTVLHQDWLNGKEYKCKVSNKALAAPIEKTISKAKGQPREPQVYTLPPCRDELTKNQVSLWCLVKGFYPSDIAVEWESNGQPENNYKTTPPVLDSDGSFFLYSKLTVDKSRWQQGNVFSCSVMHEALHNHYTQKSLSLSPG

SEQ ID NO: 79 - protein, 449 aa, synthetic construct
  REGION 1..449: note = _
QVQLVQSGAEVVKPGASVKVSCKASGYTFTSYAMHWVKEAPGQRLEWIGYIYPGQGGTNYNQKFQGRATLTADTSASTAYMELSSLRSEDTAVYFCARTGGLRRAYFTYWGQGTLVTVSSASTKGPSVFPLAPSSKSTSGGTAALGCLVKDYFPEPVTVSWNSGALTSGVHTFPAVLQSSGLYSLSSVVTVPSSSLGTQTYICNVNHKPSNTKVDKKVEPKSCDKTHTCPPCPAPEAAGGPSVFLFPPKPKDTLMISRTPEVTCVVVDVSHEDPEVKFNWYVDGVEVHNAKTKPREEQYNSTYRVVSVLTVLHQDWLNGKEYKCKVSNKALAAPIEKTISKAKGQPREPQVYTLPPCRDELTKNQVSLWCLVKGFYPSDIAVEWESNGQPENNYKTTPPVLDSDGSFFLYSKLTVDKSRWQQGNVFSCSVMHEALHNHYTQKSLSLSPG

SEQ ID NO: 80 - protein, 218 aa, synthetic construct
  REGION 1..218: note = _
DIVLTQSPATLSLSPGERATISCRASQSVSSYGQGFMHWYQQKPGQPPRLLIYGASSRATGIPARFSGSGSGTDFTLTISPLEPEDFAVYYCQQNKEDPWTFGGGTKLEIKRTVAAPSVFIFPPSDEQLKSGTASVVCLLNNFYPREAKVQWKVDNALQSGNSQESVTEQDSKDSTYSLSSTLTLSKADYEKHKVYACEVTHQGLSSPVTKSFNRGEC

SEQ ID NO: 81 - protein, 487 aa, synthetic construct
  REGION 1..487: note = _
DIQLTQSPASLAVSLGQRATISCKASQSVDYDGDSYLNWYQQIPGQPPKLLIYDASNLVSGIPPRFSGSGSGTDFTLNIHPVEKVDAATYHCQQSTEDPWTFGGGTKLEIKGGGGSGGSGSGGGGSASGSGQVQLQQSGAELVRPGSSVKISCKASGYAFSSYWMNWVKQRPGQGLEWIGQIWPGDGDTNYNGKFKGKATLTADESSSTAYMQLSSLASEDSAVYFCARRETTTVGRYYYAMDYWGQGTTVTVSSASGGSGDKTHTCPPCPAPEAAGGPSVFLFPPKPKDTLMISRTPEVTCVVVDVSHEDPEVKFNWYVDGVEVHNAKTKPREEQYNSTYRVVSVLTVLHQDWLNGKEYKCKVSNKALAAPIEKTISKAKGQPREPQVYTLPPCRDELTKNQVSLWCLVKGFYPSDIAVEWESNGQPENNYKTTPPVLDSDGSFFLYSKLTVDKSRWQQGNVFSCSVMHEALHNHYTQKSLSLSPG

SEQ ID NO: 82 - protein, 453 aa, synthetic construct
  REGION 1..453: note = _
QVQLQQSGAELVRPGSSVKISCKASGYAFSSYWMNWVKQRPGQGLEWIGQIWPGDGDTNYNGKFKGKATLTADESSSTAYMQLSSLASEDSAVYFCARRETTTVGRYYYAMDYWGQGTTVTVSSASTKGPSVFPLAPSSKSTSGGTAALGCLVKDYFPEPVTVSWNSGALTSGVHTFPAVLQSSGLYSLSSVVTVPSSSLGTQTYICNVNHKPSNTKVDKKVEPKSCDKTHTCPPCPAPEAAGGPSVFLFPPKPKDTLMISRTPEVTCVVVDVSHEDPEVKFNWYVDGVEVHNAKTKPREEQYNSTYRVVSVLTVLHQDWLNGKEYKCKVSNKALAAPIEKTISKAKGQPREPQVYTLPPCRDELTKNQVSLWCLVKGFYPSDIAVEWESNGQPENNYKTTPPVLDSDGSFFLYSKLTVDKSRWQQGNVFSCSVMHEALHNHYTQKSLSLSPG

SEQ ID NO: 83 - protein, 218 aa, synthetic construct
  REGION 1..218: note = _
DIQLTQSPASLAVSLGQRATISCKASQSVDYDGDSYLNWYQQIPGQPPKLLIYDASNLVSGIPPRFSGSGSGTDFTLNIHPVEKVDAATYHCQQSTEDPWTFGGGTKLEIKRTVAAPSVFIFPPSDEQLKSGTASVVCLLNNFYPREAKVQWKVDNALQSGNSQESVTEQDSKDSTYSLSSTLTLSKADYEKHKVYACEVTHQGLSSPVTKSFNRGEC

SEQ ID NO: 84 - protein, 490 aa, synthetic construct
  REGION 1..490: note = _
DIVLTQSPATLSLSPGERATISCRASQSVSSYGQGFMHWYQQKPGQPPRLLIYGASSRATGIPARFSGSGSGTDFTLTISPLEPEDFAVYYCQQNKEDPWTFGGGTKLEIKRTVAAPSVFIFPPSDEQLKSGTASVVCLLNNFYPREAKVQWKVDNALQSGNSQESVTEQDSKDSTYSLSSTLTLSKADYEKHKVYACEVTHQGLSSPVTKSFNRGECGGGGSGGGGSGGGGSGGGGSGGGGSGGGGSGGGGSGGGGSQVQLVQSGAEVVKPGASVKVSCKASGYTFTSYAMHWVKEAPGQRLEWIGYIYPGQGGTNYNQKFQGRATLTADTSASTAYMELSSLRSEDTAVYFCARTGGLRRAYFTYWGQGTLVTVSSASTKGPSVFPLAPSSKSTSGGTAALGCLVKDYFPEPVTVSWNSGALTSGVHTFPAVLQSSGLYSLSSVVTVPSSSLGTQTYICNVNHKPSNTKVDKKVEPKSCDKTHTCPPC

SEQ ID NO: 85 - protein, 490 aa, synthetic construct
  REGION 1..490: note = _
QVQLVQSGAEVVKPGASVKVSCKASGYTFTSYAMHWVKEAPGQRLEWIGYIYPGQGGTNYNQKFQGRATLTADTSASTAYMELSSLRSEDTAVYFCARTGGLRRAYFTYWGQGTLVTVSSGGGGSGGSGSGGGGSASGSGDIVLTQSPATLSLSPGERATISCRASQSVSSYGQGFMHWYQQKPGQPPRLLIYGASSRATGIPARFSGSGSGTDFTLTISPLEPEDFAVYYCQQNKEDPWTFGGGTKLEIKRTVAAPSVFIFPPSDEQLKSGTASVVCLLNNFYPREAKVQWKVDNALQSGNSQESVTEQDSKDSTYSLSSTLTLSKADYEKHKVYACEVTHQGLSSPVTKSFNRGECGGGGSGGSGSGGGGSASGSGASTKGPSVFPLAPSSKSTSGGTAALGCLVKDYFPEPVTVSWNSGALTSGVHTFPAVLQSSGLYSLSSVVTVPSSSLGTQTYICNVNHKPSNTKVDKKVEPKSCDKTHTCPPC

SEQ ID NO: 86 - protein, 487 aa, synthetic construct
  REGION 1..487: note = _
QVQLVQSGAEVVKPGASVKVSCKASGYTFTSYAMHWVKEAPGQRLEWIGYIYPGQGGTNYNQKFQGRATLTADTSASTAYMELSSLRSEDTAVYFCARTGGLRRAYFTYWGQGTLVTVSSGGGGSGGSGSGGGGSASGSGDIVLTQSPATLSLSPGERATISCRASQSVSSYGQGFMHWYQQKPGQPPRLLIYGASSRATGIPARFSGSGSGTDFTLTISPLEPEDFAVYYCQQNKEDPWTFGGGTKLEIKRTVAAPSVFIFPPSDEQLKSGTASVVCLLNNFYPREAKVQWKVDNALQSGNSQESVTEQDSKDSTYSLSSTLTLSKADYEKHKVYACEVTHQGLSSPVTKSFNRGECGGSGGSGSGGGSASGSGASTKGPSVFPLAPSSKSTSGGTAALGCLVKDYFPEPVTVSWNSGALTSGVHTFPAVLQSSGLYSLSSVVTVPSSSLGTQTYICNVNHKPSNTKVDKKVEPKSCDKTHTCPPC

SEQ ID NO: 87 - protein, 372 aa, synthetic construct
  REGION 1..372: note = _
DIQLTQSPASLAVSLGQRATISCKASQSVDYDGDSYLNWYQQIPGQPPKLLIYDASNLVSGIPPRFSGSGSGTDFTLNIHPVEKVDAATYHCQQSTEDPWTFGGGTKLEIKGGGGSGGSGSGGGGSASGSGQVQLQQSGAELVRPGSSVKISCKASGYAFSSYWMNWVKQRPGQGLEWIGQIWPGDGDTNYNGKFKGKATLTADESSSTAYMQLSSLASEDSAVYFCARRETTTVGRYYYAMDYWGQGTTVTVSSATVAAPSVFIFPPSDEQLKSGTASVVCLLNNFYPREAKVQWKVDNALQSGNSQESVTEQDSKDSTYSLSSTLTLSKADYEKHKVYACEVTHQGLSSPVTKSFNRGECDKTHTCPPCP

SEQ ID NO: 88 - protein, 366 aa, synthetic construct
  REGION 1..366: note = _
EIVLTQSPATLSLSPGERATLSCRASQSVSSYLAWYQQKPGQAPRLLIYDASNRATGIPARFSGSGSGTDFTLTISSLEPEDFAVYYCQQRSNWPPTFGQGTKVEIKGGGGSGGSGSGGGGSASGSGEVQLLESGGGLVQPGGSLRLSCAVSGFTFNSFAMSWVRQAPGKGLEWVSAISGSGGGTYYADSVKGRFTISRDNSKNTLYLQMNSLRAEDTAVYFCAKDKILWFGEPVFDYWGQGTLVTVSSATVAAPSVFIFPPSDEQLKSGTASVVCLLNNFYPREAKVQWKVDNALQSGNSQESVTEQDSKDSTYSLSSTLTLSKADYEKHKVYACEVTHQGLSSPVTKSFNRGECDKTHTCPPCP

SEQ ID NO: 89 - protein, 376 aa, synthetic construct
  REGION 1..376: note = _
DIQLTQSPASLAVSLGQRATISCKASQSVDYDGDSYLNWYQQIPGQPPKLLIYDASNLVSGIPPRFSGSGSGTDFTLNIHPVEKVDAATYHCQQSTEDPWTFGGGTKLEIKGGGGSGGSGSGGGGSASGSGQVQLQQSGAELVRPGSSVKISCKASGYAFSSYWMNWVKQRPGQGLEWIGQIWPGDGDTNYNGKFKGKATLTADESSSTAYMQLSSLASEDSAVYFCARRETTTVGRYYYAMDYWGQGTTVTVSSASGGSTVAAPSVFIFPPSDEQLKSGTASVVCLLNNFYPREAKVQWKVDNALQSGNSQESVTEQDSKDSTYSLSSTLTLSKADYEKHKVYACEVTHQGLSSPVTKSFNRGECDKTHTCPPCP

SEQ ID NO: 90 - protein, 370 aa, synthetic construct
  REGION 1..370: note = _
EIVLTQSPATLSLSPGERATLSCRASQSVSSYLAWYQQKPGQAPRLLIYDASNRATGIPARFSGSGSGTDFTLTISSLEPEDFAVYYCQQRSNWPPTFGQGTKVEIKGGGGSGGSGSGGGGSASGSGEVQLLESGGGLVQPGGSLRLSCAVSGFTFNSFAMSWVRQAPGKGLEWVSAISGSGGGTYYADSVKGRFTISRDNSKNTLYLQMNSLRAEDTAVYFCAKDKILWFGEPVFDYWGQGTLVTVSSASGGSTVAAPSVFIFPPSDEQLKSGTASVVCLLNNFYPREAKVQWKVDNALQSGNSQESVTEQDSKDSTYSLSSTLTLSKADYEKHKVYACEVTHQGLSSPVTKSFNRGECDKTHTCPPCP

SEQ ID NO: 91 - protein, 595 aa, synthetic construct; identical to SEQ ID NO: 60
  REGION 1..595: note = _

SEQ ID NO: 92 - protein, 600 aa, synthetic construct; identical to SEQ ID NO: 64
  REGION 1..600: note = _

SEQ ID NO: 93 - DNA, 1449 bp, synthetic construct
  misc_feature 1..1449: note = _
  source 1..1449: mol_type = other DNA
gacatcgtgctgacacagtctcccgccacactgtcactgtctccaggcgagagagccaccatcagctgtagagccagccagagcgtgtcctcttacggccagggcttcatgcactggtatcagcagaagcctggccagcctcctcggctgttgatctatggcgctagcagcagagccacaggcatccctgccagattttctggcagcggctctggcaccgacttcaccctgacaatcagccctctggaacccgaggacttcgccgtgtactactgccagcagaacaaagaggacccctggacctttggcggaggcaccaagctggaaatcaaaggcggcggaggaagcggcggatctggatctggtggcggaggatctgcttctggctctggacaggttcagctggtgcagtctggcgccgaggttgtgaaacctggcgcctccgtgaaggtgtcctgtaaagccagcggctacacctttaccagctacgccatgcattgggtcaaagaggccccaggccagaggctggaatggatcggctatatctaccctggccaaggcggcacaaactacaaccagaagttccagggcagagctaccctgaccgccgatacaagcgccagcacagcctacatggaactgagcagcctgagaagcgaggataccgccgtgtatttctgcgccagaacaggcggactgcggagagcctactttacctattggggccagggcaccctggtcacagtgtcatctgctagcggaggatccggagataagacccacacatgtcctccatgtcctgctccagaagctgccggcggaccttccgtgtttctgttccctccaaagcctaaggacaccctgatgatcagcaggacccctgaagtgacctgcgtggtggtggatgtgtctcacgaggacccagaagtgaagttcaattggtacgtggacggcgtggaagtgcacaacgccaagaccaagcctagagaggaacagtacaacagcacctacagagtggtgtccgtgctgacagtgctgcaccaggattggctgaacggcaaagagtacaagtgcaaggtgtccaacaaggccctggctgcccctatcgagaaaaccatcagcaaggccaagggccagcctagggaaccccaggtttacacccttcctccatgccgggatgagctgaccaagaaccaggtgtccctgtggtgtctggtcaagggcttctaccccagcgacattgccgtggaatgggagagcaatggccagcctgagaacaactacaagaccacacctcctgtgctggactccgacggatcattcttcctgtacagcaagctgactgtggacaagagcagatggcagcagggcaacgtgttcagctgcagcgtgatgcacgaggccctgcacaaccactacacacagaagtccctgtctctgagccctggc

SEQ ID NO: 94 - DNA, 1347 bp, synthetic construct
  misc_feature 1..1347: note = _
  source 1..1347: mol_type = other DNA
caggttcagctggttcagtctggcgccgaggttgtgaaacctggcgcctccgtgaaggtgtcctgtaaagccagcggctacacctttaccagctacgccatgcactgggtcaaagaggcccctggccaacggcttgagtggatcggctatatctacccaggccaaggcggcaccaactacaaccagaagttccagggcagagccacactgaccgccgatacaagcgccagcacagcctacatggaactgagcagcctgagaagcgaggataccgccgtgtacttctgcgccagaacaggcggactgcggagagcctactttacctattggggccagggcaccctggtcaccgtttcttctgcttcgaccaagggcccatccgtgtttcctctggctcccagcagcaagtctacaagcggaggaacagccgctctgggctgcctggtcaaggattactttcccgagcctgtgaccgtgtcctggaattctggcgctctgacaagcggcgtgcacacctttccagctgtgctgcaaagcagcggcctgtactctctgagcagcgtggtcacagtgcctagctctagcctgggcacccagacctacatctgcaatgtgaaccacaagcctagcaacaccaaggtggacaagaaggtggaacccaagagctgcgacaagacccacacctgtcctccatgtcctgctccagaagctgctggcggcccttctgtgttcctgtttcctccaaagcctaaggacaccctgatgatcagcagaacccctgaagtgacctgcgtggtggtggatgtgtctcacgaggaccccgaagtgaagttcaattggtacgtggacggcgtggaagtgcacaacgccaagaccaagcctagagaggaacagtacaacagcacctacagagtggtgtccgtgctgaccgtgctgcaccaggattggctgaacggcaaagagtacaagtgcaaggtgtccaacaaggccctggccgctcctatcgagaaaaccatcagcaaggccaagggccagcctagggaaccccaggtttacacccttcctccatgccgggatgagctgaccaagaaccaggtgtccctgtggtgtctcgtgaagggcttctaccccagcgacattgccgtggaatgggagagcaatggccagcctgagaacaactacaagacaacccctcctgtgctggacagcgacggctcattcttcctgtacagcaagctgacagtggacaagtccagatggcagcagggcaacgtgttcagctgcagcgtgatgcacgaggccctgcacaaccactacacccagaagtccctgagcctgtctcctgga

SEQ ID NO: 95 - DNA, 657 bp, synthetic construct
  misc_feature 1..657: note = _
  source 1..657: mol_type = other DNA
gacatcgtgctgacacagagccctgccaccctgtctctgagccctggcgagagagccaccatcagctgtagagccagccagagcgtgtccagctacggccagggcttcatgcactggtatcagcagaagcccggccagccccccagactgctgatctatggcgccagcagcagagccacaggcatccccgccagattttctggctctggcagcggcaccgacttcaccctgacaatcagccccctggaacccgaggacttcgccgtgtactactgccagcagaacaaagaggacccctggaccttcggcggaggcaccaagctggaaatcaagcgtacggtggccgctcccagcgtgttcatcttcccacctagcgacgagcagctgaagtccggcacagcctctgtcgtgtgcctgctgaacaacttctacccccgcgaggccaaggtgcagtggaaggtggacaatgccctgcagagcggcaacagccaggaaagcgtgaccgagcaggacagcaaggactccacctacagcctgagcagcaccctgaccctgtccaaggccgattacgagaagcacaaggtgtacgcctgcgaagtgacccaccagggcctgtctagccccgtgaccaagagcttcaaccggggcgagtgctga

SEQ ID NO: 96 - DNA, 1464 bp, synthetic construct
  misc_feature 1..1464: note = _
  source 1..1464: mol_type = other DNA
gacatccagctgacacagagccctgcttctctggccgtgtctctgggacagagagccaccatcagctgcaaggccagccagagcgttgactacgacggcgacagctacctgaactggtatcagcagatccccggccagcctcctaagctgctgatctacgatgccagcaacctggtgtctggcatccctcctagattttccggcagcggctctggcaccgacttcaccctgaatatccatcctgtggaaaaggtggacgccgccacctaccactgtcagcagagcacagaagatccctggaccttcggcggaggcaccaagctggaaatcaaaggcggcggaggaagcggcggatctggatctggtggcggaggatctgcttctggctctggacaggttcagctgcagcagtctggcgccgaactcgttagacctggcagcagcgtgaagatcagctgtaaagcctccggctacgccttcagcagctactggatgaactgggtcaagcagaggccaggccagggactggaatggatcggacaaatttggcctggcgacggcgataccaactacaacggcaagttcaagggcaaagccacactgaccgccgacgagtctagcagcacagcctacatgcagctgtctagcctggccagcgaagatagcgccgtgtacttctgtgccagacgggaaaccaccaccgtgggcagatattactacgccatggactactggggccagggcaccacagtgaccgtttctagttctgcctctggcggctccggagataagacccacacatgtcctccatgtcctgctccagaagctgccggcggaccttccgtgtttctgttccctccaaagcctaaggacaccctgatgatcagcaggacccctgaagtgacctgcgtggtggtggatgtgtctcacgaggacccagaagtgaagttcaattggtacgtggacggcgtggaagtgcacaacgccaagaccaagcctagagaggaacagtacaacagcacctacagagtggtgtccgtgctgacagtgctgcaccaggattggctgaacggcaaagagtacaagtgcaaggtgtccaacaaggccctggctgcccctatcgagaaaaccatcagcaaggccaagggccagcctagggaaccccaggtttacacccttcctccatgccgggatgagctgaccaagaaccaggtgtccctgtggtgtctggtcaagggcttctaccccagcgacattgccgtggaatgggagagcaatggccagcctgagaacaactacaagaccacacctcctgtgctggactccgacggatcattcttcctgtacagcaagctgactgtggacaagagcagatggcagcagggcaacgtgttcagctgcagcgtgatgcacgaggccctgcacaaccactacacacagaagtccctgtctctgagccctggc

SEQ ID NO: 97 - DNA, 1359 bp, synthetic construct
  misc_feature 1..1359: note = _
  source 1..1359: mol_type = other DNA
caggttcagctgcagcagtctggcgccgaactcgttagacctggcagcagcgtgaagatcagctgcaaggccagcggctacgccttcagcagctactggatgaactgggtcaagcagaggcctggacagggcctcgagtggatcggacaaatttggcctggcgacggcgacaccaactacaacggcaagttcaagggcaaagccacactgaccgccgacgagtctagcagcacagcctacatgcagctgtctagcctggccagcgaagatagcgccgtgtacttctgtgccagacgggaaaccaccaccgtgggcagatattactacgccatggactactggggccagggcaccacagtgacagtctcttctgcttcgaccaagggcccatccgtgtttcctctggctcccagcagcaagtctacaagcggaggaacagccgctctgggctgcctggtcaaggattactttcccgagcctgtgaccgtgtcctggaattctggcgctctgacaagcggcgtgcacacctttccagctgtgctgcaaagcagcggcctgtactctctgagcagcgtggtcacagtgcctagctctagcctgggcacccagacctacatctgcaatgtgaaccacaagcctagcaacaccaaggtggacaagaaggtggaacccaagagctgcgacaagacccacacctgtcctccatgtcctgctccagaagctgctggcggcccttctgtgttcctgtttcctccaaagcctaaggacaccctgatgatcagcagaacccctgaagtgacctgcgtggtggtggatgtgtctcacgaggaccccgaagtgaagttcaattggtacgtggacggcgtggaagtgcacaacgccaagaccaagcctagagaggaacagtacaacagcacctacagagtggtgtccgtgctgaccgtgctgcaccaggattggctgaacggcaaagagtacaagtgcaaggtgtccaacaaggccctggccgctcctatcgagaaaaccatcagcaaggccaagggccagcctagggaaccccaggtttacacccttcctccatgccgggatgagctgaccaagaaccaggtgtccctgtggtgtctcgtgaagggcttctaccccagcgacattgccgtggaatgggagagcaatggccagcctgagaacaactacaagacaacccctcctgtgctggacagcgacggctcattcttcctgtacagcaagctgacagtggacaagtccagatggcagcagggcaacgtgttcagctgcagcgtgatgcacgaggccctgcacaaccactacacccagaagtccctgagcctgtctcctgga

SEQ ID NO: 98 - DNA, 654 bp, synthetic construct
  misc_feature 1..654: note = _
  source 1..654: mol_type = other DNA
gacatccagctgacacagagccctgcttctctggccgtgtctctgggacagagagccaccatcagctgcaaggccagccagagcgttgactacgacggcgacagctacctgaactggtatcagcagatccccggccagcctcctaagctgctgatctacgatgccagcaacctggtgtctggcatccctcctagattttccggcagcggctctggcaccgacttcaccctgaatatccatcctgtggaaaaggtggacgccgccacctaccactgtcagcagagcacagaagatccctggacctttggcggaggcaccaagctggaaatcaagcgtacggtggccgctcccagcgtgttcatcttcccacctagcgacgagcagctgaagtccggcacagcctctgtcgtgtgcctgctgaacaacttctacccccgcgaggccaaagtgcagtggaaggtggacaacgccctgcagagcggcaacagccaggaaagcgtgaccgagcaggacagcaaggactccacctacagcctgagcagcaccctgacactgagcaaggccgactacgagaagcacaaggtgtacgcctgcgaagtgacccaccagggcctgtctagccccgtgaccaagagcttcaaccggggcgagtgt

SEQ ID NO: 99 - DNA, 2121 bp, synthetic construct
  misc_feature 1..2121: note = _
  source 1..2121: mol_type = other DNA
gacatcgtgctgacacagtctcccgccacactgtcactgtctccaggcgagagagccaccatcagctgtagagccagccagagcgtgtcctcttacggccagggcttcatgcactggtatcagcagaagcctggccagcctcctcggctgttgatctatggcgctagcagcagagccacaggcatccctgccagattttctggcagcggctctggcaccgacttcaccctgacaatcagccctctggaacccgaggacttcgccgtgtactactgccagcagaacaaagaggacccctggacctttggcggaggcaccaagctggaaatcaagcgtacggtggccgctcccagcgtgttcatcttcccacctagcgacgagcagctgaagtccggcacagcctctgtcgtgtgcctgctgaacaacttctacccccgcgaggccaaagtgcagtggaaggtggacaacgccctgcagagcggcaacagccaggaaagcgtgaccgagcaggacagcaaggactccacctacagcctgagcagcaccctgacactgagcaaggccgactacgagaagcacaaggtgtacgcctgcgaagtgacccaccagggcctgtctagccccgtgaccaagagcttcaaccggggcgagtgtggaggcggaggatctggcggaggtggaagtggcggaggcggttctggtggtggtggctctggtggcggcggttcaggcggcggaggaagcggaggcggcggaagtggtggcggtggatctcaggttcagctggttcagtctggcgccgaggttgtgaaacctggcgcctccgtgaaggtgtcctgtaaagccagcggctacacctttaccagctacgccatgcactgggtcaaagaggcccctggccaacggcttgagtggatcggctatatctacccaggccaaggcggcaccaactacaaccagaagttccagggcagagccacactgaccgccgatacaagcgccagcacagcctacatggaactgagcagcctgagaagcgaggataccgccgtgtacttctgcgccagaacaggcggactgcggagagcctactttacctattggggccagggcaccctggtcaccgtttcttctgcttcgaccaagggcccatccgtgtttcctctggctcccagcagcaagtctacaagcggaggaacagccgctctgggctgcctggtcaaggattactttcccgagcctgtgaccgtgtcctggaattctggcgctctgacaagcggcgtgcacacctttccagctgtgctgcaaagcagcggcctgtactctctgagcagcgtggtcacagtgcctagctctagcctgggcacccagacctacatctgcaatgtgaaccacaagcctagcaacaccaaggtggacaagaaggtggaacccaagagctgcgacaagacccacacctgtcctccatgtcctgctccagaagctgctggcggcccttctgtgttcctgtttcctccaaagcctaaggacaccctgatgatcagcagaacccctgaagtgacctgcgtggtggtggatgtgtctcacgaggaccccgaagtgaagttcaattggtacgtggacggcgtggaagtgcacaacgccaagaccaagcctagagaggaacagtacaacagcacctacagagtggtgtccgtgctgaccgtgctgcaccaggattggctgaacggcaaagagtacaagtgcaaggtgtccaacaaggccctggccgctcctatcgagaaaaccatcagcaaggccaagggccagcctagggaaccccaggtttacacccttcctccatgccgggatgagctgaccaagaaccaggtgtccctgtggtgtctcgtgaagggcttctaccccagcgacattgccgtggaatgggagagcaatggccagcctgagaacaactacaagacaacccctcctgtgctggacagcgacggctcattcttcctgtacagcaagctgacagtggacaagtccagatggcagcagggcaacgtgttcagctgcagcgtgatgcacgaggccctgcacaaccactacacccagaagtccctgagcctgtctcctgga

SEQ ID NO: 100 - DNA, 2121 bp, synthetic construct
  misc_feature 1..2121: note = _
  source 1..2121: mol_type = other DNA
caggttcagctggttcagtctggcgccgaggttgtgaaacctggcgcctccgtgaaggtgtcctgtaaagccagcggctacacctttaccagctacgccatgcactgggtcaaagaggcccctggccaacggcttgagtggatcggctatatctacccaggccaaggcggcaccaactacaaccagaagttccagggcagagccacactgaccgccgatacaagcgccagcacagcctacatggaactgagcagcctgagaagcgaggataccgccgtgtacttctgcgccagaacaggcggactgcggagagcctactttacctattggggccagggcaccctggtcaccgtttcttctggaggcggaggaagcggaggatctggatctggcggaggcggatctgctagtggatctggagacatcgtgctgacacagtctcccgccacactgtcactgtctccaggcgagagagccaccatcagctgtagagccagccagagcgtgtcctcttacggccagggcttcatgcactggtatcagcagaagcctggccagcctcctcggctgttgatctatggcgctagcagcagagccacaggcatccctgccagattttctggcagcggctctggcaccgacttcaccctgacaatcagccctctggaacccgaggacttcgccgtgtactactgccagcagaacaaagaggacccctggacctttggcggaggcaccaagctggaaatcaagcgtacggtggccgctcccagcgtgttcatcttcccacctagcgacgagcagctgaagtccggcacagcctctgtcgtgtgcctgctgaacaacttctacccccgcgaggccaaagtgcagtggaaggtggacaacgccctgcagagcggcaacagccaggaaagcgtgaccgagcaggacagcaaggactccacctacagcctgagcagcaccctgacactgagcaaggccgactacgagaagcacaaggtgtacgcctgcgaagtgacccaccagggcctgtctagccccgtgaccaagagcttcaaccggggcgagtgtggtggcggaggtagcggaggcagcggcagcggaggaggcgggagcgccagcggcagcggagcttcgaccaagggcccatccgtgtttcctctggctcccagcagcaagtctacaagcggaggaacagccgctctgggctgcctggtcaaggattactttcccgagcctgtgaccgtgtcctggaattctggcgctctgacaagcggcgtgcacacctttccagctgtgctgcaaagcagcggcctgtactctctgagcagcgtggtcacagtgcctagctctagcctgggcacccagacctacatctgcaatgtgaaccacaagcctagcaacaccaaggtggacaagaaggtggaacccaagagctgcgacaagacccacacctgtcctccatgtcctgctccagaagctgctggcggcccttctgtgttcctgtttcctccaaagcctaaggacaccctgatgatcagcagaacccctgaagtgacctgcgtggtggtggatgtgtctcacgaggaccccgaagtgaagttcaattggtacgtggacggcgtggaagtgcacaacgccaagaccaagcctagagaggaacagtacaacagcacctacagagtggtgtccgtgctgaccgtgctgcaccaggattggctgaacggcaaagagtacaagtgcaaggtgtccaacaaggccctggccgctcctatcgagaaaaccatcagcaaggccaagggccagcctagggaaccccaggtttacacccttcctccatgccgggatgagctgaccaagaaccaggtgtccctgtggtgtctcgtgaagggcttctaccccagcgacattgccgtggaatgggagagcaatggccagcctgagaacaactacaagacaacccctcctgtgctggacagcgacggctcattcttcctgtacagcaagctgacagtggacaagtccagatggcagcagggcaacgtgttcagctgcagcgtgatgcacgaggccctgcacaaccactacacccagaagtccctgagcctgtctcctgga

SEQ ID NO: 101 - DNA, 2112 bp, synthetic construct
  misc_feature 1..2112: note = _
  source 1..2112: mol_type = other DNA
caggttcagctggttcagtctggcgccgaggttgtgaaacctggcgcctccgtgaaggtgtcctgtaaagccagcggctacacctttaccagctacgccatgcactgggtcaaagaggcccctggccaacggcttgagtggatcggctatatctacccaggccaaggcggcaccaactacaaccagaagttccagggcagagccacactgaccgccgatacaagcgccagcacagcctacatggaactgagcagcctgagaagcgaggataccgccgtgtacttctgcgccagaacaggcggactgcggagagcctactttacctattggggccagggcaccctggtcaccgtttcttctggaggcggaggaagcggaggatctggatctggcggaggcggatctgctagtggatctggagacatcgtgctgacacagtctcccgccacactgtcactgtctccaggcgagagagccaccatcagctgtagagccagccagagcgtgtcctcttacggccagggcttcatgcactggtatcagcagaagcctggccagcctcctcggctgttgatctatggcgctagcagcagagccacaggcatccctgccagattttctggcagcggctctggcaccgacttcaccctgacaatcagccctctggaacccgaggacttcgccgtgtactactgccagcagaacaaagaggacccctggacctttggcggaggcaccaagctggaaatcaagcgtacggtggccgctcccagcgtgttcatcttcccacctagcgacgagcagctgaagtccggcacagcctctgtcgtgtgcctgctgaacaacttctacccccgcgaggccaaagtgcagtggaaggtggacaacgccctgcagagcggcaacagccaggaaagcgtgaccgagcaggacagcaaggactccacctacagcctgagcagcaccctgacactgagcaaggccgactacgagaagcacaaggtgtacgcctgcgaagtgacccaccagggcctgtctagccccgtgaccaagagcttcaaccggggcgagtgtggaggcagcggtggcagcgggagcggtggaggcagcgccagcgggagcggcgcttcgaccaagggcccatccgtgtttcctctggctcccagcagcaagtctacaagcggaggaacagccgctctgggctgcctggtcaaggattactttcccgagcctgtgaccgtgtcctggaattctggcgctctgacaagcggcgtgcacacctttccagctgtgctgcaaagcagcggcctgtactctctgagcagcgtggtcacagtgcctagctctagcctgggcacccagacctacatctgcaatgtgaaccacaagcctagcaacaccaaggtggacaagaaggtggaacccaagagctgcgacaagacccacacctgtcctccatgtcctgctccagaagctgctggcggcccttctgtgttcctgtttcctccaaagcctaaggacaccctgatgatcagcagaacccctgaagtgacctgcgtggtggtggatgtgtctcacgaggaccccgaagtgaagttcaattggtacgtggacggcgtggaagtgcacaacgccaagaccaagcctagagaggaacagtacaacagcacctacagagtggtgtccgtgctgaccgtgctgcaccaggattggctgaacggcaaagagtacaagtgcaaggtgtccaacaaggccctggccgctcctatcgagaaaaccatcagcaaggccaagggccagcctagggaaccccaggtttacacccttcctccatgccgggatgagctgaccaagaaccaggtgtccctgtggtgtctcgtgaagggcttctaccccagcgacattgccgtggaatgggagagcaatggccagcctgagaacaactacaagacaacccctcctgtgctggacagcgacggctcattcttcctgtacagcaagctgacagtggacaagtccagatggcagcagggcaacgtgttcagctgcagcgtgatgcacgaggccctgcacaaccactacacccagaagtccctgagcctgtctcctgga

SEQ ID NO: 102 - DNA, 1764 bp, synthetic construct
  misc_feature 1..1764: note = _
  source 1..1764: mol_type = other DNA
gacatccagctgacacagagccctgcttctctggccgtgtctctgggacagagagccaccatcagctgcaaggccagccagagcgttgactacgacggcgacagctacctgaactggtatcagcagatccccggccagcctcctaagctgctgatctacgatgccagcaacctggtgtctggcatccctcctagattttccggcagcggctctggcaccgacttcaccctgaatatccatcctgtggaaaaggtggacgccgccacctaccactgtcagcagagcacagaagatccctggacctttggcggaggcaccaagctggaaatcaagggaggcggaggatctggcggatctggaagtggcggcggtggatctgcttctggctctggccaggttcagctgcagcagtctggcgccgaactcgttagacctggcagcagcgtgaagatcagctgcaaggccagcggctacgccttcagcagctactggatgaactgggtcaagcagaggcctggacagggcctcgagtggatcggacaaatttggcctggcgacggcgacaccaactacaacggcaagttcaagggcaaagccacactgaccgccgacgagtctagcagcacagcctacatgcagctgtctagcctggccagcgaagatagcgccgtgtacttctgtgccagacgggaaaccaccaccgtgggcagatattactacgccatggactactggggccagggcaccacagtgacagtctcttctgctacagtggccgctcccagcgtgttcatcttcccacctagcgacgagcagctgaagtccggcacagcctctgtcgtgtgcctgctgaacaacttctacccccgcgaggccaaagtgcagtggaaggtggacaacgccctgcagagcggcaacagccaggaaagcgtgaccgagcaggacagcaaggactccacctacagcctgagcagcaccctgacactgagcaaggccgactacgagaagcacaaggtgtacgcctgcgaagtgacccaccagggcctgtctagccccgtgaccaagagcttcaaccggggcgagtgtgataagacccacacatgtcctccatgtcctgctccagaagctgccggcggaccttccgtgtttctgttccctccaaagcctaaggacaccctgatgatcagcaggacccctgaagtgacctgcgtggtggtggatgtgtctcacgaggacccagaagtgaagttcaattggtacgtggacggcgtggaagtgcacaacgccaagaccaagcctagagaggaacagtacaacagcacctacagagtggtgtccgtgctgacagtgctgcaccaggattggctgaacggcaaagagtacaagtgcaaggtgtccaacaaggccctggctgcccctatcgagaaaaccatcagcaaggccaagggccagcctagggaaccccaggtttacacccttcctccatgccgggatgagctgaccaagaaccaggtgtccctgtggtgtctggtcaagggcttctaccccagcgacattgccgtggaatgggagagcaatggccagcctgagaacaactacaagaccacacctcctgtgctggactccgacggatcattcttcctgtacagcaagctgactgtggacaagagcagatggcagcagggcaacgtgttcagctgcagcgtgatgcacgaggccctgcacaaccactacacacagaagtccctgtctctgagccctggc

SEQ ID NO: 103 - DNA, 1746 bp, synthetic construct
  misc_feature 1..1746: note = _
  source 1..1746: mol_type = other DNA
gagatcgtgctgacacagtctcccgccacactgtcactgtctccaggcgaaagagccacactgagctgtagagccagccagagcgtgtcctcttacctggcctggtatcagcagaagcctggacaggctccccggctgctgatctacgatgccagcaatagagccacaggcatccccgccagattttctggctctggcagcggcaccgatttcaccctgaccataagcagcctggaacctgaggacttcgccgtgtactactgccagcagagaagcaactggcctcctacctttggccagggcaccaaggtggaaatcaagggaggcggaggatctggcggatctggaagtggcggcggtggatctgcttctggctctggcgaagtgcagctgctggaatctggcggaggactggttcaacctggcggctctctgagactgagctgtgccgtgtccggcttcaccttcaacagcttcgccatgagctgggtccgacaggcccctggaaaaggccttgaatgggtgtccgccatctctggaagcggcggaggcacatattacgccgactctgtgaagggcagattcaccatcagccgggacaacagcaagaacaccctgtacctgcagatgaacagcctgagagccgaggataccgccgtgtacttctgcgccaaggacaagatcctttggttcggcgagcccgtgttcgactattggggacagggaaccctggtcaccgtgtctagtgctacagtggccgctcccagcgtgttcatcttcccacctagcgacgagcagctgaagtccggcacagcctctgtcgtgtgcctgctgaacaacttctacccccgcgaggccaaagtgcagtggaaggtggacaacgccctgcagagcggcaacagccaggaaagcgtgaccgagcaggacagcaaggactccacctacagcctgagcagcaccctgacactgagcaaggccgactacgagaagcacaaggtgtacgcctgcgaagtgacccaccagggcctgtctagccccgtgaccaagagcttcaaccggggcgagtgtgataagacccacacatgtcctccatgtcctgctccagaagctgccggcggaccttccgtgtttctgttccctccaaagcctaaggacaccctgatgatcagcaggacccctgaagtgacctgcgtggtggtggatgtgtctcacgaggacccagaagtgaagttcaattggtacgtggacggcgtggaagtgcacaacgccaagaccaagcctagagaggaacagtacaacagcacctacagagtggtgtccgtgctgacagtgctgcaccaggattggctgaacggcaaagagtacaagtgcaaggtgtccaacaaggccctggctgcccctatcgagaaaaccatcagcaaggccaagggccagcctagggaaccccaggtttacacccttcctccatgccgggatgagctgaccaagaaccaggtgtccctgtggtgtctggtcaagggcttctaccccagcgacattgccgtggaatgggagagcaatggccagcctgagaacaactacaagaccacacctcctgtgctggactccgacggatcattcttcctgtacagcaagctgactgtggacaagagcagatggcagcagggcaacgtgttcagctgcagcgtgatgcacgaggccctgcacaaccactacacacagaagtccctgtctctgagccctggc

SEQ ID NO: 104 - DNA, 1776 bp, synthetic construct
  misc_feature 1..1776: note = _
  source 1..1776: mol_type = other DNA
gacatccagctgacacagagccctgcttctctggccgtgtctctgggacagagagccaccatcagctgcaaggccagccagagcgttgactacgacggcgacagctacctgaactggtatcagcagatccccggccagcctcctaagctgctgatctacgatgccagcaacctggtgtctggcatccctcctagattttccggcagcggctctggcaccgacttcaccctgaatatccatcctgtggaaaaggtggacgccgccacctaccactgtcagcagagcacagaagatccctggacctttggcggaggcaccaagctggaaatcaagggaggcggaggatctggcggatctggaagtggcggcggtggatctgcttctggctctggccaggttcagctgcagcagtctggcgccgaactcgttagacctggcagcagcgtgaagatcagctgcaaggccagcggctacgccttcagcagctactggatgaactgggtcaagcagaggcctggacagggcctcgagtggatcggacaaatttggcctggcgacggcgacaccaactacaacggcaagttcaagggcaaagccacactgaccgccgacgagtctagcagcacagcctacatgcagctgtctagcctggccagcgaagatagcgccgtgtacttctgtgccagacgggaaaccaccaccgtgggcagatattactacgccatggactactggggccagggcaccacagtgacagtctcttctgccagcggaggtagcacagtggccgctcccagcgtgttcatcttcccacctagcgacgagcagctgaagtccggcacagcctctgtcgtgtgcctgctgaacaacttctacccccgcgaggccaaagtgcagtggaaggtggacaacgccctgcagagcggcaacagccaggaaagcgtgaccgagcaggacagcaaggactccacctacagcctgagcagcaccctgacactgagcaaggccgactacgagaagcacaaggtgtacgcctgcgaagtgacccaccagggcctgtctagccccgtgaccaagagcttcaaccggggcgagtgtgataagacccacacatgtcctccatgtcctgctccagaagctgccggcggaccttccgtgtttctgttccctccaaagcctaaggacaccctgatgatcagcaggacccctgaagtgacctgcgtggtggtggatgtgtctcacgaggacccagaagtgaagttcaattggtacgtggacggcgtggaagtgcacaacgccaagaccaagcctagagaggaacagtacaacagcacctacagagtggtgtccgtgctgacagtgctgcaccaggattggctgaacggcaaagagtacaagtgcaaggtgtccaacaaggccctggctgcccctatcgagaaaaccatcagcaaggccaagggccagcctagggaaccccaggtttacacccttcctccatgccgggatgagctgaccaagaaccaggtgtccctgtggtgtctggtcaagggcttctaccccagcgacattgccgtggaatgggagagcaatggccagcctgagaacaactacaagaccacacctcctgtgctggactccgacggatcattcttcctgtacagcaagctgactgtggacaagagcagatggcagcagggcaacgtgttcagctgcagcgtgatgcacgaggccctgcacaaccactacacacagaagtccctgtctctgagccctggc

SEQ ID NO: 105 - DNA, 1758 bp, synthetic construct
  misc_feature 1..1758: note = _
  source 1..1758: mol_type = other DNA
gagatcgtgctgacacagtctcccgccacactgtcactgtctccaggcgaaagagccacactgagctgtagagccagccagagcgtgtcctcttacctggcctggtatcagcagaagcctggacaggctccccggctgctgatctacgatgccagcaatagagccacaggcatccccgccagattttctggctctggcagcggcaccgatttcaccctgaccataagcagcctggaacctgaggacttcgccgtgtactactgccagcagagaagcaactggcctcctacctttggccagggcaccaaggtggaaatcaagggaggcggaggatctggcggatctggaagtggcggcggtggatctgcttctggctctggcgaagtgcagctgctggaatctggcggaggactggttcaacctggcggctctctgagactgagctgtgccgtgtccggcttcaccttcaacagcttcgccatgagctgggtccgacaggcccctggaaaaggccttgaatgggtgtccgccatctctggaagcggcggaggcacatattacgccgactctgtgaagggcagattcaccatcagccgggacaacagcaagaacaccctgtacctgcagatgaacagcctgagagccgaggataccgccgtgtacttctgcgccaaggacaagatcctttggttcggcgagcccgtgttcgactattggggacagggaaccctggtcaccgtgtctagtgccagcggaggtagcacagtggccgctcccagcgtgttcatcttcccacctagcgacgagcagctgaagtccggcacagcctctgtcgtgtgcctgctgaacaacttctacccccgcgaggccaaagtgcagtggaaggtggacaacgccctgcagagcggcaacagccaggaaagcgtgaccgagcaggacagcaaggactccacctacagcctgagcagcaccctgacactgagcaaggccgactacgagaagcacaaggtgtacgcctgcgaagtgacccaccagggcctgtctagccccgtgaccaagagcttcaaccggggcgagtgtgataagacccacacatgtcctccatgtcctgctccagaagctgccggcggaccttccgtgtttctgttccctccaaagcctaaggacaccctgatgatcagcaggacccctgaagtgacctgcgtggtggtggatgtgtctcacgaggacccagaagtgaagttcaattggtacgtggacggcgtggaagtgcacaacgccaagaccaagcctagagaggaacagtacaacagcacctacagagtggtgtccgtgctgacagtgctgcaccaggattggctgaacggcaaagagtacaagtgcaaggtgtccaacaaggccctggctgcccctatcgagaaaaccatcagcaaggccaagggccagcctagggaaccccaggtttacacccttcctccatgccgggatgagctgaccaagaaccaggtgtccctgtggtgtctggtcaagggcttctaccccagcgacattgccgtggaatgggagagcaatggccagcctgagaacaactacaagaccacacctcctgtgctggactccgacggatcattcttcctgtacagcaagctgactgtggacaagagcagatggcagcagggcaacgtgttcagctgcagcgtgatgcacgaggccctgcacaaccactacacacagaagtccctgtctctgagccctggc

SEQ ID NO: 106 - DNA, 2433 bp, synthetic construct; identical to SEQ ID NO: 69
  misc_feature 1..2433: note = _
  source 1..2433: mol_type = other DNA

SEQ ID NO: 107 - DNA, 2448 bp, synthetic construct; identical to SEQ ID NO: 73
  misc_feature 1..2448: note = _
  source 1..2448: mol_type = other DNA

SEQ ID NO: 108 - protein, 5 aa, synthetic construct
  REGION 1..5: note = _
RYTMH

SEQ ID NO: 109 - protein, 17 aa, synthetic construct
  REGION 1..17: note = _
YINPSRGYTNYNQKFKD

SEQ ID NO: 110 - protein, 10 aa, synthetic construct
  REGION 1..10: note = _
YYDDHYSLDY

SEQ ID NO: 111 - protein, 10 aa, synthetic construct
  REGION 1..10: note = _
RASSSVSYMN

SEQ ID NO: 112 - protein, 7 aa, synthetic construct
  REGION 1..7: note = _
DTSKVAS

SEQ ID NO: 113 - protein, 9 aa, synthetic construct
  REGION 1..9: note = _
QQWSSNPLT

SEQ ID NO: 114 - protein, 5 aa, synthetic construct
  REGION 1..5: note = _
SYWMN

SEQ ID NO: 115 - protein, 17 aa, synthetic construct
  REGION 1..17: note = _
QIWPGDGDTNYNGKFKG

SEQ ID NO: 116 - protein, 15 aa, synthetic construct
  REGION 1..15: note = _
RETTTVGRYYYAMDY

SEQ ID NO: 117 - protein, 15 aa, synthetic construct
  REGION 1..15: note = _
KASQSVDYDGDSYLN

SEQ ID NO: 118 - protein, 7 aa, synthetic construct
  REGION 1..7: note = _
DASNLVS

SEQ ID NO: 119 - protein, 9 aa, synthetic construct
  REGION 1..9: note = _
QQSTEDPWT

SEQ ID NO: 120 - protein, 5 aa, synthetic construct
  REGION 1..5: note = _
SFAMS

SEQ ID NO: 121 - protein, 16 aa, synthetic construct
  REGION 1..16: note = _
AISGSGGGTYYADSKG

SEQ ID NO: 122 - protein, 13 aa, synthetic construct
  REGION 1..13: note = _
DKILWFGEPVFDY

SEQ ID NO: 123 - protein, 11 aa, synthetic construct
  REGION 1..11: note = _
RASQSVSSYLA

SEQ ID NO: 124 - protein, 7 aa, synthetic construct
  REGION 1..7: note = _
DASNRAT

SEQ ID NO: 125 - protein, 9 aa, synthetic construct
  REGION 1..9: note = _
QQRSNWPPT

SEQ ID NO: 126 - protein, 5 aa, synthetic construct
  REGION 1..5: note = _
SYAMH

SEQ ID NO: 127 - protein, 17 aa, synthetic construct
  REGION 1..17: note = _
YIYPGQGGTNYNQKFQG

SEQ ID NO: 128 - protein, 11 aa, synthetic construct
  REGION 1..11: note = _
TGGLRRAYFTY

SEQ ID NO: 129 - protein, 15 aa, synthetic construct
  REGION 1..15: note = _
RASQSVSSYGQGFMH

SEQ ID NO: 130 - protein, 7 aa, synthetic construct
  REGION 1..7: note = _
GASSRAT

SEQ ID NO: 131 - protein, 9 aa, synthetic construct
  REGION 1..9: note = _
QQNKEDPWT

SEQ ID NO: 132 - protein, 490 aa, synthetic construct; identical to SEQ ID NO: 32
  REGION 1..490: note = _

SEQ ID NO: 133 - protein, 502 aa, synthetic construct; identical to SEQ ID NO: 33
  REGION 1..502: note = _

SEQ ID NO: 134 - protein, 722 aa, synthetic construct; identical to SEQ ID NO: 34
  REGION 1..722: note = _

SEQ ID NO: 135 - protein, 722 aa, synthetic construct; identical to SEQ ID NO: 35
  REGION 1..722: note = _

SEQ ID NO: 136 - protein, 722 aa, synthetic construct; identical to SEQ ID NO: 36
  REGION 1..722: note = _

SEQ ID NO: 137 - protein, 722 aa, synthetic construct; identical to SEQ ID NO: 37
  REGION 1..722: note = _

SEQ ID NO: 138 - protein, 714 aa, synthetic construct; identical to SEQ ID NO: 38
  REGION 1..714: note = _

SEQ ID NO: 139 - protein, 714 aa, synthetic construct; identical to SEQ ID NO: 39
  REGION 1..714: note = _

SEQ ID NO: 140 - protein, 726 aa, synthetic construct
  REGION 1..726: note = _
DIQLTQSPASLAVSLGQRATISCKASQSVDYDGDSYLNWYQQIPGQPPKLLIYDASNLVSGIPPRFSGSGSGTDFTLNIHPVEKVDAATYHCQQSTEDPWTFGGGTKLEIKGGSSGEIVLTQSPATLSLSPGERATLSCRASQSVSSYLAWYQQKPGQAPRLLIYDASNRATGIPARFSGSGSGTDFTLTISSLEPEDFAVYYCQQRSNWPPTFGQGTKVEIKGGGGSGGSGSGGGGSASGSGEVQLLESGGGLVQPGGSLRLSCAVSGFTFNSFAMSWVRQAPGKGLEWVSAISGSGGGTYYADSVKGRFTISRDNSKNTLYLQMNSLRAEDTAVYFCAKDKILWFGEPVFDYWGQGTLVTVSSGGSSGQVQLQQSGAELVRPGSSVKISCKASGYAFSSYWMNWVKQRPGQGLEWIGQIWPGDGDTNYNGKFKGKATLTADESSSTAYMQLSSLASEDSAVYFCARRETTTVGRYYYAMDYWGQGTTVTVSSASGGSGDKTHTCPPCPAPEAAGGPSVFLFPPKPKDTLMISRTPEVTCVVVDVSHEDPEVKFNWYVDGVEVHNAKTKPREEQYNSTYRVVSVLTVLHQDWLNGKEYKCKVSNKALAAPIEKTISKAKGQPREPQVYTLPPCRDELTKNQVSLWCLVKGFYPSDIAVEWESNGQPENNYKTTPPVLDSDGSFFLYSKLTVDKSRWQQGNVFSCSVMHEALHNHYTQKSLSLSPG

SEQ ID NO: 141 - protein, 726 aa, synthetic construct
  REGION 1..726: note = _
EIVLTQSPATLSLSPGERATLSCRASQSVSSYLAWYQQKPGQAPRLLIYDASNRATGIPARFSGSGSGTDFTLTISSLEPEDFAVYYCQQRSNWPPTFGQGTKVEIKGGSSGDIQLTQSPASLAVSLGQRATISCKASQSVDYDGDSYLNWYQQIPGQPPKLLIYDASNLVSGIPPRFSGSGSGTDFTLNIHPVEKVDAATYHCQQSTEDPWTFGGGTKLEIKGGGGSGGSGSGGGGSASGSGQVQLQQSGAELVRPGSSVKISCKASGYAFSSYWMNWVKQRPGQGLEWIGQIWPGDGDTNYNGKFKGKATLTADESSSTAYMQLSSLASEDSAVYFCARRETTTVGRYYYAMDYWGQGTTVTVSSGGSSGEVQLLESGGGLVQPGGSLRLSCAVSGFTFNSFAMSWVRQAPGKGLEWVSAISGSGGGTYYADSVKGRFTISRDNSKNTLYLQMNSLRAEDTAVYFCAKDKILWFGEPVFDYWGQGTLVTVSSASGGSGDKTHTCPPCPAPEAAGGPSVFLFPPKPKDTLMISRTPEVTCVVVDVSHEDPEVKFNWYVDGVEVHNAKTKPREEQYNSTYRVVSVLTVLHQDWLNGKEYKCKVSNKALAAPIEKTISKAKGQPREPQVYTLPPCRDELTKNQVSLWCLVKGFYPSDIAVEWESNGQPENNYKTTPPVLDSDGSFFLYSKLTVDKSRWQQGNVFSCSVMHEALHNHYTQKSLSLSPG

SEQ ID NO: 142 - protein, 721 aa, synthetic construct; identical to SEQ ID NO: 40
  REGION 1..721: note = _

SEQ ID NO: 143 - protein, 721 aa, synthetic construct; identical to SEQ ID NO: 41
  REGION 1..721: note = _

SEQ ID NO: 144 - protein, 706 aa, synthetic construct
  REGION 1..706: note = _
DIQMTQSPSSLSASVGDRVTITCHASQNIYVWLNWYQQKPGKAPKLLIYKASNLHTGVPSRFSGSGSGTDFTLTISSLQPEDFATYYCQQGQTYPYTFGGGTKVEIKGDIQLTQSPAIMSASPGEKVTMTCRASSSVSYMNWYQQKSGTSPKRWIYDTSKVASGVPYRFSGSGSGTSYSLTISSMEAEDAATYYCQQWSSNPLTFGAGTKLELKGGGGSGGSGSGGGGSASGSGDIKLQQSGAELARPGASVKMSCKTSGYTFTRYTMHWVKQRPGQGLEWIGYINPSRGYTNYNQKFKDKATLTTDKSSSTAYMQLSSLTSEDSAVYYCARYYDDHYSLDYWGQGTTLTVSSGQVQLVQSGAEVKKPGASVKVSCKASGYTFTSYYIHWVRQAPGQGLEWIGSIYPGNVNTNYNEKFKDRATLTVDTSISTAYMELSRLRSDDTAVYFCTRSHYGLDWNFDVWGQGTTVTVSSASGGSGDKTHTCPPCPAPEAAGGPSVFLFPPKPKDTLMISRTPEVTCVVVDVSHEDPEVKFNWYVDGVEVHNAKTKPREEQYNSTYRVVSVLTVLHQDWLNGKEYKCKVSNKALAAPIEKTISKAKGQPREPQVCTLPPSRDELTKNQVSLSCAVKGFYPSDIAVEWESNGQPENNYKTTPPVLDSDGSFFLVSKLTVDKSRWQQGNVFSCSVMHEALHNHYTQKSLSLSPG

SEQ ID NO: 145 - protein, 724 aa, synthetic construct
  REGION 1..724: note = _
DIQMTQSPSSLSASVGDRVTITCHASQNIYVWLNWYQQKPGKAPKLLIYKASNLHTGVPSRFSGSGSGTDFTLTISSLQPEDFATYYCQQGQTYPYTFGGGTKVEIKSGGSGSSGGSDIQLTQSPAIMSASPGEKVTMTCRASSSVSYMNWYQQKSGTSPKRWIYDTSKVASGVPYRFSGSGSGTSYSLTISSMEAEDAATYYCQQWSSNPLTFGAGTKLELKGGGGSGGSGSGGGGSASGSGDIKLQQSGAELARPGASVKMSCKTSGYTFTRYTMHWVKQRPGQGLEWIGYINPSRGYTNYNQKFKDKATLTTDKSSSTAYMQLSSLTSEDSAVYYCARYYDDHYSLDYWGQGTTLTVSSGGSGGSSGSSQVQLVQSGAEVKKPGASVKVSCKASGYTFTSYYIHWVRQAPGQGLEWIGSIYPGNVNTNYNEKFKDRATLTVDTSISTAYMELSRLRSDDTAVYFCTRSHYGLDWNFDVWGQGTTVTVSSASGGSGDKTHTCPPCPAPEAAGGPSVFLFPPKPKDTLMISRTPEVTCVVVDVSHEDPEVKFNWYVDGVEVHNAKTKPREEQYNSTYRVVSVLTVLHQDWLNGKEYKCKVSNKALAAPIEKTISKAKGQPREPQVCTLPPSRDELTKNQVSLSCAVKGFYPSDIAVEWESNGQPENNYKTTPPVLDSDGSFFLVSKLTVDKSRWQQGNVFSCSVMHEALHNHYTQKSLSLSPG

SEQ ID NO: 146 - protein, 718 aa, synthetic construct
  REGION 1..718: note = _
DIQLTQSPASLAVSLGQRATISCKASQSVDYDGDSYLNWYQQIPGQPPKLLIYDASNLVSGIPPRFSGSGSGTDFTLNIHPVEKVDAATYHCQQSTEDPWTFGGGTKLEIKGEIVLTQSPATLSLSPGERATLSCRASQSVSSYLAWYQQKPGQAPRLLIYDASNRATGIPARFSGSGSGTDFTLTISSLEPEDFAVYYCQQRSNWPPTFGQGTKVEIKGGGGSGGSGSGGGGSASGSGEVQLLESGGGLVQPGGSLRLSCAVSGFTFNSFAMSWVRQAPGKGLEWVSAISGSGGGTYYADSVKGRFTISRDNSKNTLYLQMNSLRAEDTAVYFCAKDKILWFGEPVFDYWGQGTLVTVSSGQVQLQQSGAELVRPGSSVKISCKASGYAFSSYWMNWVKQRPGQGLEWIGQIWPGDGDTNYNGKFKGKATLTADESSSTAYMQLSSLASEDSAVYFCARRETTTVGRYYYAMDYWGQGTTVTVSSASGGSGDKTHTCPPCPAPEAAGGPSVFLFPPKPKDTLMISRTPEVTCVVVDVSHEDPEVKFNWYVDGVEVHNAKTKPREEQYNSTYRVVSVLTVLHQDWLNGKEYKCKVSNKALAAPIEKTISKAKGQPREPQVCTLPPSRDELTKNQVSLSCAVKGFYPSDIAVEWESNGQPENNYKTTPPVLDSDGSFFLVSKLTVDKSRWQQGNVFSCSVMHEALHNHYTQKSLSLSPG

SEQ ID NO: 147 - protein, 736 aa, synthetic construct
  REGION 1..736: note = _
DIQLTQSPASLAVSLGQRATISCKASQSVDYDGDSYLNWYQQIPGQPPKLLIYDASNLVSGIPPRFSGSGSGTDFTLNIHPVEKVDAATYHCQQSTEDPWTFGGGTKLEIKSGGSGSSGGSEIVLTQSPATLSLSPGERATLSCRASQSVSSYLAWYQQKPGQAPRLLIYDASNRATGIPARFSGSGSGTDFTLTISSLEPEDFAVYYCQQRSNWPPTFGQGTKVEIKGGGGSGGSGSGGGGSASGSGEVQLLESGGGLVQPGGSLRLSCAVSGFTFNSFAMSWVRQAPGKGLEWVSAISGSGGGTYYADSVKGRFTISRDNSKNTLYLQMNSLRAEDTAVYFCAKDKILWFGEPVFDYWGQGTLVTVSSGGSGGSSGSSQVQLQQSGAELVRPGSSVKISCKASGYAFSSYWMNWVKQRPGQGLEWIGQIWPGDGDTNYNGKFKGKATLTADESSSTAYMQLSSLASEDSAVYFCARRETTTVGRYYYAMDYWGQGTTVTVSSASGGSGDKTHTCPPCPAPEAAGGPSVFLFPPKPKDTLMISRTPEVTCVVVDVSHEDPEVKFNWYVDGVEVHNAKTKPREEQYNSTYRVVSVLTVLHQDWLNGKEYKCKVSNKALAAPIEKTISKAKGQPREPQVYTLPPCRDELTKNQVSLWCLVKGFYPSDIAVEWESNGQPENNYKTTPPVLDSDGSFFLYSKLTVDKSRWQQGNVFSCSVMHEALHNHYTQKSLSLSPG

SEQ ID NO: 148 - protein, 811 aa, synthetic construct
  REGION 1..811: note = _
DIQMTQSPSSLSASVGDRVTITCHASQNIYVWLNWYQQKPGKAPKLLIYKASNLHTGVPSRFSGSGSGTDFTLTISSLQPEDFATYYCQQGQTYPYTFGGGTKVEIKGGSSGDIQLTQSPAIMSASPGEKVTMTCRASSSVSYMNWYQQKSGTSPKRWIYDTSKVASGVPYRFSGSGSGTSYSLTISSMEAEDAATYYCQQWSSNPLTFGAGTKLELKGGGGSGGSGSGGGGSASGSGDIKLQQSGAELARPGASVKMSCKTSGYTFTRYTMHWVKQRPGQGLEWIGYINPSRGYTNYNQKFKDKATLTTDKSSSTAYMQLSSLTSEDSAVYYCARYYDDHYSLDYWGQGTTLTVSSGGSSGQVQLVQSGAEVKKPGASVKVSCKASGYTFTSYYIHWVRQAPGQGLEWIGSIYPGNVNTNYNEKFKDRATLTVDTSISTAYMELSRLRSDDTAVYFCTRSHYGLDWNFDVWGQGTTVTVSSASTKGPSVFPLAPSSKSTSGGTAALGCLVKDYFPEPVTVSWNSGALTSGVHTFPAVLQSSGLYSLSSVVTVPSSSLGTQTYICNVNHKPSNTKVDKKVEPKSCDKTHTCPPCPAPEAAGGPSVFLFPPKPKDTLMISRTPEVTCVVVDVSHEDPEVKFNWYVDGVEVHNAKTKPREEQYNSTYRVVSVLTVLHQDWLNGKEYKCKVSNKALAAPIEKTISKAKGQPREPQVCTLPPSRDELTKNQVSLSCAVKGFYPSDIAVEWESNGQPENNYKTTPPVLDSDGSFFLVSKLTVDKSRWQQGNVFSCSVMHEALHNHYTQKSLSLSPG

SEQ ID NO: 149 - protein, 827 aa, synthetic construct
  REGION 1..827: note = _
DIQLTQSPASLAVSLGQRATISCKASQSVDYDGDSYLNWYQQIPGQPPKLLIYDASNLVSGIPPRFSGSGSGTDFTLNIHPVEKVDAATYHCQQSTEDPWTFGGGTKLEIKGGSSGEIVLTQSPATLSLSPGERATLSCRASQSVSSYLAWYQQKPGQAPRLLIYDASNRATGIPARFSGSGSGTDFTLTISSLEPEDFAVYYCQQRSNWPPTFGQGTKVEIKGGGGSGGSGSGGGGSASGSGEVQLLESGGGLVQPGGSLRLSCAVSGFTFNSFAMSWVRQAPGKGLEWVSAISGSGGGTYYADSVKGRFTISRDNSKNTLYLQMNSLRAEDTAVYFCAKDKILWFGEPVFDYWGQGTLVTVSSGGSSGQVQLQQSGAELVRPGSSVKISCKASGYAFSSYWMNWVKQRPGQGLEWIGQIWPGDGDTNYNGKFKGKATLTADESSSTAYMQLSSLASEDSAVYFCARRETTTVGRYYYAMDYWGQGTTVTVSSATVAAPSVFIFPPSDEQLKSGTASVVCLLNNFYPREAKVQWKVDNALQSGNSQESVTEQDSKDSTYSLSSTLTLSKADYEKHKVYACEVTHQGLSSPVTKSFNRGECDKTHTCPPCPAPEAAGGPSVFLFPPKPKDTLMISRTPEVTCVVVDVSHEDPEVKFNWYVDGVEVHNAKTKPREEQYNSTYRVVSVLTVLHQDWLNGKEYKCKVSNKALAAPIEKTISKAKGQPREPQVYTLPPCRDELTKNQVSLWCLVKGFYPSDIAVEWESNGQPENNYKTTPPVLDSDGSFFLYSKLTVDKSRWQQGNVFSCSVMHEALHNHYTQKSLSLSPG

SEQ ID NO: 150 - protein, 811 aa, synthetic construct
  REGION 1..811: note = _
DIQMTQSPSSLSASVGDRVTITCHASQNIYVWLNWYQQKPGKAPKLLIYKASNLHTGVPSRFSGSGSGTDFTLTISSLQPEDFATYYCQQGQTYPYTFGGGTKVEIKGGSSGDIQLTQSPAIMSASPGEKVTMTCRASSSVSYMNWYQQKSGTSPKRWIYDTSKVASGVPYRFSGSGSGTSYSLTISSMEAEDAATYYCQQWSSNPLTFGAGTKLELKGGGGSGGSGSGGGGSASGSGDIKLQQSGAELARPGASVKMSCKTSGYTFTRYTMHWVKQRPGQGLEWIGYINPSRGYTNYNQKFKDKATLTTDKSSSTAYMQLSSLTSEDSAVYYCARYYDDHYSLDYWGQGTTLTVSSGGSSGQVQLVQSGAEVKKPGASVKVSCKASGYTFTSYYIHWVRQAPGQGLEWIGSIYPGNVNTNYNEKFKDRATLTVDTSISTAYMELSRLRSDDTAVYFCTRSHYGLDWNFDVWGQGTTVTVSSASTKGPSVFPLAPSSKSTSGGTAALGCLVKDYFPEPVTVSWNSGALTSGVHTFPAVLQSSGLYSLSSVVTVPSSSLGTQTYICNVNHKPSNTKVDKKVEPKSSDKTHTCPPCPAPEAAGGPSVFLFPPKPKDTLMISRTPEVTCVVVDVSHEDPEVKFNWYVDGVEVHNAKTKPREEQYNSTYRVVSVLTVLHQDWLNGKEYKCKVSNKALAAPIEKTISKAKGQPREPQVCTLPPSRDELTKNQVSLSCAVKGFYPSDIAVEWESNGQPENNYKTTPPVLDSDGSFFLVSKLTVDKSRWQQGNVFSCSVMHEALHNHYTQKSLSLSPG

SEQ ID NO: 151 - protein, 611 aa, synthetic construct
  REGION 1..611: note = _
DIQLTQSPASLAVSLGQRATISCKASQSVDYDGDSYLNWYQQIPGQPPKLLIYDASNLVSGIPPRFSGSGSGTDFTLNIHPVEKVDAATYHCQQSTEDPWTFGGGTKLEIKGGSSGEIVLTQSPATLSLSPGERATLSCRASQSVSSYLAWYQQKPGQAPRLLIYDASNRATGIPARFSGSGSGTDFTLTISSLEPEDFAVYYCQQRSNWPPTFGQGTKVEIKGGGGSGGSGSGGGGSASGSGEVQLLESGGGLVQPGGSLRLSCAVSGFTFNSFAMSWVRQAPGKGLEWVSAISGSGGGTYYADSVKGRFTISRDNSKNTLYLQMNSLRAEDTAVYFCAKDKILWFGEPVFDYWGQGTLVTVSSGGSSGQVQLQQSGAELVRPGSSVKISCKASGYAFSSYWMNWVKQRPGQGLEWIGQIWPGDGDTNYNGKFKGKATLTADESSSTAYMQLSSLASEDSAVYFCARRETTTVGRYYYAMDYWGQGTTVTVSSATVAAPSVFIFPPSDEQLKSGTASVVCLLNNFYPREAKVQWKVDNALQSGNSQESVTEQDSKDSTYSLSSTLTLSKADYEKHKVYACEVTHQGLSSPVTKSFNRGESDKTHTCPPCP

SEQ ID NO: 152 - protein, 813 aa, synthetic construct
  REGION 1..813: note = _
DIQMTQSPSSLSASVGDRVTITCHASQNIYVWLNWYQQKPGKAPKLLIYKASNLHTGVPSRFSGSGSGTDFTLTISSLQPEDFATYYCQQGQTYPYTFGGGTKVEIKGGSSGDIQLTQSPAIMSASPGEKVTMTCRASSSVSYMNWYQQKSGTSPKRWIYDTSKVASGVPYRFSGSGSGTSYSLTISSMEAEDAATYYCQQWSSNPLTFGAGTKLELKGGGGSGGSGSGGGGSASGSGDIKLQQSGAELARPGASVKMSCKTSGYTFTRYTMHWVKQRPGQGLEWIGYINPSRGYTNYNQKFKDKATLTTDKSSSTAYMQLSSLTSEDSAVYYCARYYDDHYSLDYWGQGTTLTVSSGGSSGQVQLVQSGAEVKKPGASVKVSCKASGYTFTSYYIHWVRQAPGQGLEWIGSIYPGNVNTNYNEKFKDRATLTVDTSISTAYMELSRLRSDDTAVYFCTRSHYGLDWNFDVWGQGTTVTVSSASTKGPSVFPLAPSSKSTSGGTAALGCLVKDYFPEPVTVSWNSGALTSGVHTFPAVLQSSGLYSLSSVVTVPSSSLGTQTYICNVNHKPSNTKVDKKVEPKTPLGDTTHTCPPCPAPEAAGGPSVFLFPPKPKDTLMISRTPEVTCVVVDVSHEDPEVKFNWYVDGVEVHNAKTKPREEQYNSTYRVVSVLTVLHQDWLNGKEYKCKVSNKALAAPIEKTISKAKGQPREPQVCTLPPSRDELTKNQVSLSCAVKGFYPSDIAVEWESNGQPENNYKTTPPVLDSDGSFFLVSKLTVDKSRWQQGNVFSCSVMHEALHNHYTQKSLSLSPG

SEQ ID NO: 153 - protein, 830 aa, synthetic construct
  REGION 1..830: note = _
DIQLTQSPASLAVSLGQRATISCKASQSVDYDGDSYLNWYQQIPGQPPKLLIYDASNLVSGIPPRFSGSGSGTDFTLNIHPVEKVDAATYHCQQSTEDPWTFGGGTKLEIKGGSSGEIVLTQSPATLSLSPGERATLSCRASQSVSSYLAWYQQKPGQAPRLLIYDASNRATGIPARFSGSGSGTDFTLTISSLEPEDFAVYYCQQRSNWPPTFGQGTKVEIKGGGGSGGSGSGGGGSASGSGEVQLLESGGGLVQPGGSLRLSCAVSGFTFNSFAMSWVRQAPGKGLEWVSAISGSGGGTYYADSVKGRFTISRDNSKNTLYLQMNSLRAEDTAVYFCAKDKILWFGEPVFDYWGQGTLVTVSSGGSSGQVQLQQSGAELVRPGSSVKISCKASGYAFSSYWMNWVKQRPGQGLEWIGQIWPGDGDTNYNGKFKGKATLTADESSSTAYMQLSSLASEDSAVYFCARRETTTVGRYYYAMDYWGQGTTVTVSSATVAAPSVFIFPPSDEQLKSGTASVVCLLNNFYPREAKVQWKVDNALQSGNSQESVTEQDSKDSTYSLSSTLTLSKADYEKHKVYACEVTHQGLSSPVTKSFNRGETPLGDTTHTCPPCPAPEAAGGPSVFLFPPKPKDTLMISRTPEVTCVVVDVSHEDPEVKFNWYVDGVEVHNAKTKPREEQYNSTYRVVSVLTVLHQDWLNGKEYKCKVSNKALAAPIEKTISKAKGQPREPQVYTLPPCRDELTKNQVSLWCLVKGFYPSDIAVEWESNGQPENNYKTTPPVLDSDGSFFLYSKLTVDKSRWQQGNVFSCSVMHEALHNHYTQKSLSLSPG

SEQ ID NO: 154 - protein, 814 aa, synthetic construct
  REGION 1..814: note = _
DIQMTQSPSSLSASVGDRVTITCHASQNIYVWLNWYQQKPGKAPKLLIYKASNLHTGVPSRFSGSGSGTDFTLTISSLQPEDFATYYCQQGQTYPYTFGGGTKVEIKGGSSGDIQLTQSPAIMSASPGEKVTMTCRASSSVSYMNWYQQKSGTSPKRWIYDTSKVASGVPYRFSGSGSGTSYSLTISSMEAEDAATYYCQQWSSNPLTFGAGTKLELKGGGGSGGSGSGGGGSASGSGDIKLQQSGAELARPGASVKMSCKTSGYTFTRYTMHWVKQRPGQGLEWIGYINPSRGYTNYNQKFKDKATLTTDKSSSTAYMQLSSLTSEDSAVYYCARYYDDHYSLDYWGQGTTLTVSSGGSSGQVQLVQSGAEVKKPGASVKVSCKASGYTFTSYYIHWVRQAPGQGLEWIGSIYPGNVNTNYNEKFKDRATLTVDTSISTAYMELSRLRSDDTAVYFCTRSHYGLDWNFDVWGQGTTVTVSSGSSASTKGPSVFPLAPSSKSTSGGTAALGCLVKDYFPEPVTVSWNSGALTSGVHTFPAVLQSSGLYSLSSVVTVPSSSLGTQTYICNVNHKPSNTKVDKKVEPKSCDKTHTCPPCPAPEAAGGPSVFLFPPKPKDTLMISRTPEVTCVVVDVSHEDPEVKFNWYVDGVEVHNAKTKPREEQYNSTYRVVSVLTVLHQDWLNGKEYKCKVSNKALAAPIEKTISKAKGQPREPQVYTLPPCRDELTKNQVSLWCLVKGFYPSDIAVEWESNGQPENNYKTTPPVLDSDGSFFLYSKLTVDKSRWQQGNVFSCSVMHEALHNHYTQKSLSLSPG

SEQ ID NO: 155 - protein, 829 aa, synthetic construct
  REGION 1..829: note = _
DIQLTQSPASLAVSLGQRATISCKASQSVDYDGDSYLNWYQQIPGQPPKLLIYDASNLVSGIPPRFSGSGSGTDFTLNIHPVEKVDAATYHCQQSTEDPWTFGGGTKLEIKGGSSGEIVLTQSPATLSLSPGERATLSCRASQSVSSYLAWYQQKPGQAPRLLIYDASNRATGIPARFSGSGSGTDFTLTISSLEPEDFAVYYCQQRSNWPPTFGQGTKVEIKGGGGSGGSGSGGGGSASGSGEVQLLESGGGLVQPGGSLRLSCAVSGFTFNSFAMSWVRQAPGKGLEWVSAISGSGGGTYYADSVKGRFTISRDNSKNTLYLQMNSLRAEDTAVYFCAKDKILWFGEPVFDYWGQGTLVTVSSGGSSGQVQLQQSGAELVRPGSSVKISCKASGYAFSSYWMNWVKQRPGQGLEWIGQIWPGDGDTNYNGKFKGKATLTADESSSTAYMQLSSLASEDSAVYFCARRETTTVGRYYYAMDYWGQGTTVTVSSASGTVAAPSVFIFPPSDEQLKSGTASVVCLLNNFYPREAKVQWKVDNALQSGNSQESVTEQDSKDSTYSLSSTLTLSKADYEKHKVYACEVTHQGLSSPVTKSFNRGECDKTHTCPPCPAPEAAGGPSVFLFPPKPKDTLMISRTPEVTCVVVDVSHEDPEVKFNWYVDGVEVHNAKTKPREEQYNSTYRVVSVLTVLHQDWLNGKEYKCKVSNKALAAPIEKTISKAKGQPREPQVYTLPPCRDELTKNQVSLWCLVKGFYPSDIAVEWESNGQPENNYKTTPPVLDSDGSFFLYSKLTVDKSRWQQGNVFSCSVMHEALHNHYTQKSLSLSPG

SEQ ID NO: 156 - protein, 816 aa, synthetic construct
  REGION 1..816: note = _
DIQMTQSPSSLSASVGDRVTITCHASQNIYVWLNWYQQKPGKAPKLLIYKASNLHTGVPSRFSGSGSGTDFTLTISSLQPEDFATYYCQQGQTYPYTFGGGTKVEIKGGSSGDIQLTQSPAIMSASPGEKVTMTCRASSSVSYMNWYQQKSGTSPKRWIYDTSKVASGVPYRFSGSGSGTSYSLTISSMEAEDAATYYCQQWSSNPLTFGAGTKLELKGGGGSGGSGSGGGGSASGSGDIKLQQSGAELARPGASVKMSCKTSGYTFTRYTMHWVKQRPGQGLEWIGYINPSRGYTNYNQKFKDKATLTTDKSSSTAYMQLSSLTSEDSAVYYCARYYDDHYSLDYWGQGTTLTVSSGGSSGQVQLVQSGAEVKKPGASVKVSCKASGYTFTSYYIHWVRQAPGQGLEWIGSIYPGNVNTNYNEKFKDRATLTVDTSISTAYMELSRLRSDDTAVYFCTRSHYGLDWNFDVWGQGTTVTVSSGSSGSASTKGPSVFPLAPSSKSTSGGTAALGCLVKDYFPEPVTVSWNSGALTSGVHTFPAVLQSSGLYSLSSVVTVPSSSLGTQTYICNVNHKPSNTKVDKKVEPKSCDKTHTCPPCPAPEAAGGPSVFLFPPKPKDTLMISRTPEVTCVVVDVSHEDPEVKFNWYVDGVEVHNAKTKPREEQYNSTYRVVSVLTVLHQDWLNGKEYKCKVSNKALAAPIEKTISKAKGQPREPQVCTLPPSRDELTKNQVSLSCAVKGFYPSDIAVEWESNGQPENNYKTTPPVLDSDGSFFLVSKLTVDKSRWQQGNVFSCSVMHEALHNHYTQKSLSLSPG

SEQ ID NO: 157 - protein, 831 aa, synthetic construct
  REGION 1..831: note = _
DIQLTQSPASLAVSLGQRATISCKASQSVDYDGDSYLNWYQQIPGQPPKLLIYDASNLVSGIPPRFSGSGSGTDFTLNIHPVEKVDAATYHCQQSTEDPWTFGGGTKLEIKGGSSGEIVLTQSPATLSLSPGERATLSCRASQSVSSYLAWYQQKPGQAPRLLIYDASNRATGIPARFSGSGSGTDFTLTISSLEPEDFAVYYCQQRSNWPPTFGQGTKVEIKGGGGSGGSGSGGGGSASGSGEVQLLESGGGLVQPGGSLRLSCAVSGFTFNSFAMSWVRQAPGKGLEWVSAISGSGGGTYYADSVKGRFTISRDNSKNTLYLQMNSLRAEDTAVYFCAKDKILWFGEPVFDYWGQGTLVTVSSGGSSGQVQLQQSGAELVRPGSSVKISCKASGYAFSSYWMNWVKQRPGQGLEWIGQIWPGDGDTNYNGKFKGKATLTADESSSTAYMQLSSLASEDSAVYFCARRETTTVGRYYYAMDYWGQGTTVTVSSASGGSTVAAPSVFIFPPSDEQLKSGTASVVCLLNNFYPREAKVQWKVDNALQSGNSQESVTEQDSKDSTYSLSSTLTLSKADYEKHKVYACEVTHQGLSSPVTKSFNRGECDKTHTCPPCPAPEAAGGPSVFLFPPKPKDTLMISRTPEVTCVVVDVSHEDPEVKFNWYVDGVEVHNAKTKPREEQYNSTYRVVSVLTVLHQDWLNGKEYKCKVSNKALAAPIEKTISKAKGQPREPQVYTLPPCRDELTKNQVSLWCLVKGFYPSDIAVEWESNGQPENNYKTTPPVLDSDGSFFLYSKLTVDKSRWQQGNVFSCSVMHEALHNHYTQKSLSLSPG

SEQ ID NO: 158 - protein, 714 aa, synthetic construct
  REGION 1..714: note = _
DIKLQQSGAELARPGASVKMSCKTSGYTFTRYTMHWVKQRPGQGLEWIGYINPSRGYTNYNQKFKDKATLTTDKSSSTAYMQLSSLTSEDSAVYYCARYYDDHYSLDYWGQGTTLTVSSGGSSGQVQLVQSGAEVKKPGASVKVSCKASGYTFTSYYIHWVRQAPGQGLEWIGSIYPGNVNTNYNEKFKDRATLTVDTSISTAYMELSRLRSDDTAVYFCTRSHYGLDWNFDVWGQGTTVTVSSGGGGSGGSGSGGGGSASGSGDIQMTQSPSSLSASVGDRVTITCHASQNIYVWLNWYQQKPGKAPKLLIYKASNLHTGVPSRFSGSGSGTDFTLTISSLQPEDFATYYCQQGQTYPYTFGGGTKVEIKGGSSGDIQLTQSPAIMSASPGEKVTMTCRASSSVSYMNWYQQKSGTSPKRWIYDTSKVASGVPYRFSGSGSGTSYSLTISSMEAEDAATYYCQQWSSNPLTFGAGTKLELKASGGSGDKTHTCPPCPAPEAAGGPSVFLFPPKPKDTLMISRTPEVTCVVVDVSHEDPEVKFNWYVDGVEVHNAKTKPREEQYNSTYRVVSVLTVLHQDWLNGKEYKCKVSNKALAAPIEKTISKAKGQPREPQVCTLPPSRDELTKNQVSLSCAVKGFYPSDIAVEWESNGQPENNYKTTPPVLDSDGSFFLVSKLTVDKSRWQQGNVFSCSVMHEALHNHYTQKSLSLSPG

SEQ ID NO: 159 - protein, 714 aa, synthetic construct
  REGION 1..714: note = _
QVQLVQSGAEVKKPGASVKVSCKASGYTFTSYYIHWVRQAPGQGLEWIGSIYPGNVNTNYNEKFKDRATLTVDTSISTAYMELSRLRSDDTAVYFCTRSHYGLDWNFDVWGQGTTVTVSSGGSSGDIKLQQSGAELARPGASVKMSCKTSGYTFTRYTMHWVKQRPGQGLEWIGYINPSRGYTNYNQKFKDKATLTTDKSSSTAYMQLSSLTSEDSAVYYCARYYDDHYSLDYWGQGTTLTVSSGGGGSGGSGSGGGGSASGSGDIQLTQSPAIMSASPGEKVTMTCRASSSVSYMNWYQQKSGTSPKRWIYDTSKVASGVPYRFSGSGSGTSYSLTISSMEAEDAATYYCQQWSSNPLTFGAGTKLELKGGSSGDIQMTQSPSSLSASVGDRVTITCHASQNIYVWLNWYQQKPGKAPKLLIYKASNLHTGVPSRFSGSGSGTDFTLTISSLQPEDFATYYCQQGQTYPYTFGGGTKVEIKASGGSGDKTHTCPPCPAPEAAGGPSVFLFPPKPKDTLMISRTPEVTCVVVDVSHEDPEVKFNWYVDGVEVHNAKTKPREEQYNSTYRVVSVLTVLHQDWLNGKEYKCKVSNKALAAPIEKTISKAKGQPREPQVCTLPPSRDELTKNQVSLSCAVKGFYPSDIAVEWESNGQPENNYKTTPPVLDSDGSFFLVSKLTVDKSRWQQGNVFSCSVMHEALHNHYTQKSLSLSPG

SEQ ID NO: 160 - protein, 726 aa, synthetic construct
  REGION 1..726: note = _
EVQLLESGGGLVQPGGSLRLSCAVSGFTFNSFAMSWVRQAPGKGLEWVSAISGSGGGTYYADSVKGRFTISRDNSKNTLYLQMNSLRAEDTAVYFCAKDKILWFGEPVFDYWGQGTLVTVSSGGSSGQVQLQQSGAELVRPGSSVKISCKASGYAFSSYWMNWVKQRPGQGLEWIGQIWPGDGDTNYNGKFKGKATLTADESSSTAYMQLSSLASEDSAVYFCARRETTTVGRYYYAMDYWGQGTTVTVSSGGGGSGGSGSGGGGSASGSGDIQLTQSPASLAVSLGQRATISCKASQSVDYDGDSYLNWYQQIPGQPPKLLIYDASNLVSGIPPRFSGSGSGTDFTLNIHPVEKVDAATYHCQQSTEDPWTFGGGTKLEIKGGSSGEIVLTQSPATLSLSPGERATLSCRASQSVSSYLAWYQQKPGQAPRLLIYDASNRATGIPARFSGSGSGTDFTLTISSLEPEDFAVYYCQQRSNWPPTFGQGTKVEIKASGGSGDKTHTCPPCPAPEAAGGPSVFLFPPKPKDTLMISRTPEVTCVVVDVSHEDPEVKFNWYVDGVEVHNAKTKPREEQYNSTYRVVSVLTVLHQDWLNGKEYKCKVSNKALAAPIEKTISKAKGQPREPQVYTLPPCRDELTKNQVSLWCLVKGFYPSDIAVEWESNGQPENNYKTTPPVLDSDGSFFLYSKLTVDKSRWQQGNVFSCSVMHEALHNHYTQKSLSLSPG

SEQ ID NO: 161 - protein, 726 aa, synthetic construct
  REGION 1..726: note = _
QVQLQQSGAELVRPGSSVKISCKASGYAFSSYWMNWVKQRPGQGLEWIGQIWPGDGDTNYNGKFKGKATLTADESSSTAYMQLSSLASEDSAVYFCARRETTTVGRYYYAMDYWGQGTTVTVSSGGSSGEVQLLESGGGLVQPGGSLRLSCAVSGFTFNSFAMSWVRQAPGKGLEWVSAISGSGGGTYYADSVKGRFTISRDNSKNTLYLQMNSLRAEDTAVYFCAKDKILWFGEPVFDYWGQGTLVTVSSGGGGSGGSGSGGGGSASGSGEIVLTQSPATLSLSPGERATLSCRASQSVSSYLAWYQQKPGQAPRLLIYDASNRATGIPARFSGSGSGTDFTLTISSLEPEDFAVYYCQQRSNWPPTFGQGTKVEIKGGSSGDIQLTQSPASLAVSLGQRATISCKASQSVDYDGDSYLNWYQQIPGQPPKLLIYDASNLVSGIPPRFSGSGSGTDFTLNIHPVEKVDAATYHCQQSTEDPWTFGGGTKLEIKASGGSGDKTHTCPPCPAPEAAGGPSVFLFPPKPKDTLMISRTPEVTCVVVDVSHEDPEVKFNWYVDGVEVHNAKTKPREEQYNSTYRVVSVLTVLHQDWLNGKEYKCKVSNKALAAPIEKTISKAKGQPREPQVYTLPPCRDELTKNQVSLWCLVKGFYPSDIAVEWESNGQPENNYKTTPPVLDSDGSFFLYSKLTVDKSRWQQGNVFSCSVMHEALHNHYTQKSLSLSPG

SEQ ID NO: 162 - protein, 940 aa, synthetic construct
  REGION 1..940: note = _
DIQLTQSPAIMSASPGEKVTMTCRASSSVSYMNWYQQKSGTSPKRWIYDTSKVASGVPYRFSGSGSGTSYSLTISSMEAEDAATYYCQQWSSNPLTFGAGTKLELKGGSSGDIQMTQSPSSLSASVGDRVTITCRASQDVNTAVAWYQQKPGKAPKLLIYSASFLYSGVPSRFSGSRSGTDFTLTISSLQPEDFATYYCQQHYTTPPTFGQGTKVEIKGGGGSGGSGSGGGGSASGSGEVQLVESGGGLVQPGGSLRLSCAASGFNIKDTYIHWVRQAPGKGLEWVARIYPTNGYTRYADSVKGRFTISADTSKNTAYLQMNSLRAEDTAVYYCSRWGGDGFYAMDYWGQGTLVTVSSGGSSGDIKLQQSGAELARPGASVKMSCKTSGYTFTRYTMHWVKQRPGQGLEWIGYINPSRGYTNYNQKFKDKATLTTDKSSSTAYMQLSSLTSEDSAVYYCARYYDDHYSLDYWGQGTTLTVSSASGGSGDKTHTCPPCPAPEAAGGPSVFLFPPKPKDTLMISRTPEVTCVVVDVSHEDPEVKFNWYVDGVEVHNAKTKPREEQYNSTYRVVSVLTVLHQDWLNGKEYKCKVSNKALAAPIEKTISKAKGQPREPQVYTLPPSRDELTKNQVSLTCLVKGFYPSDIAVEWESNGQPENNYKTTPPVLDSDGSFFLYSKLTVDKSRWQQGNVFSCSVMHEALHNHYTQKSLSLSPGDKTHTCPPCPAPEAAGGPSVFLFPPKPKDTLMISRTPEVTCVVVDVSHEDPEVKFNWYVDGVEVHNAKTKPREEQYNSTYRVVSVLTVLHQDWLNGKEYKCKVSNKALAAPIEKTISKAKGQPREPQVYTLPPSRDELTKNQVSLTCLVKGFYPSDIAVEWESNGQPENNYKTTPPVLDSDGSFFLYSKLTVDKSRWQQGNVFSCSVMHEALHNHYTQKSLSLSPG

SEQ ID NO: 163 - protein, 979 aa, synthetic construct
  REGION 1..979: note = _
DIQLTQSPAIMSASPGEKVTMTCRASSSVSYMNWYQQKSGTSPKRWIYDTSKVASGVPYRFSGSGSGTSYSLTISSMEAEDAATYYCQQWSSNPLTFGAGTKLELKGGSSGDIQMTQSPSSLSASVGDRVTITCRASQDVNTAVAWYQQKPGKAPKLLIYSASFLYSGVPSRFSGSRSGTDFTLTISSLQPEDFATYYCQQHYTTPPTFGQGTKVEIKGGGGSGGSGSGGGGSASGSGEVQLVESGGGLVQPGGSLRLSCAASGFNIKDTYIHWVRQAPGKGLEWVARIYPTNGYTRYADSVKGRFTISADTSKNTAYLQMNSLRAEDTAVYYCSRWGGDGFYAMDYWGQGTLVTVSSGGSSGDIKLQQSGAELARPGASVKMSCKTSGYTFTRYTMHWVKQRPGQGLEWIGYINPSRGYTNYNQKFKDKATLTTDKSSSTAYMQLSSLTSEDSAVYYCARYYDDHYSLDYWGQGTTLTVSSASGGSGDKTHTCPPCPAPEAAGGPSVFLFPPKPKDTLMISRTPEVTCVVVDVSHEDPEVKFNWYVDGVEVHNAKTKPREEQYNSTYRVVSVLTVLHQDWLNGKEYKCKVSNKALAAPIEKTISKAKGQPREPQVYTLPPSRDELTKNQVSLTCLVKGFYPSDIAVEWESNGQPENNYKTTPPVLDSDGSFFLYSKLTVDKSRWQQGNVFSCSVMHEALHNHYTQKSLSLSPGGGGGSGSGGSGGGSSGGGGSGGGGSGGGGSGGGGSGGGGSSSSTCPPCPAPEAAGGPSVFLFPPKPKDTLMISRTPEVTCVVVDVSHEDPEVKFNWYVDGVEVHNAKTKPREEQYNSTYRVVSVLTVLHQDWLNGKEYKCKVSNKALAAPIEKTISKAKGQPREPQVYTLPPSRDELTKNQVSLTCLVKGFYPSDIAVEWESNGQPENNYKTTPPVLDSDGSFFLYSKLTVDKSRWQQGNVFSCSVMHEALHNHYTQKSLSLSPG

SEQ ID NO: 164 - protein, 981 aa, synthetic construct
  REGION 1..981: note = _
DIQLTQSPAIMSASPGEKVTMTCRASSSVSYMNWYQQKSGTSPKRWIYDTSKVASGVPYRFSGSGSGTSYSLTISSMEAEDAATYYCQQWSSNPLTFGAGTKLELKGGSSGDIQMTQSPSSLSASVGDRVTITCRASQDVNTAVAWYQQKPGKAPKLLIYSASFLYSGVPSRFSGSRSGTDFTLTISSLQPEDFATYYCQQHYTTPPTFGQGTKVEIKGGGGSGGSGSGGGGSASGSGEVQLVESGGGLVQPGGSLRLSCAASGFNIKDTYIHWVRQAPGKGLEWVARIYPTNGYTRYADSVKGRFTISADTSKNTAYLQMNSLRAEDTAVYYCSRWGGDGFYAMDYWGQGTLVTVSSGGSSGDIKLQQSGAELARPGASVKMSCKTSGYTFTRYTMHWVKQRPGQGLEWIGYINPSRGYTNYNQKFKDKATLTTDKSSSTAYMQLSSLTSEDSAVYYCARYYDDHYSLDYWGQGTTLTVSSASGGSGDKTHTCPPCPAPEAAGGPSVFLFPPKPKDTLMISRTPEVTCVVVDVSHEDPEVKFNWYVDGVEVHNAKTKPREEQYNSTYRVVSVLTVLHQDWLNGKEYKCKVSNKALAAPIEKTISKAKGQPREPQVYTLPPSRDELTKNQVSLTCLVKGFYPSDIAVEWESNGQPENNYKTTPPVLDSDGSFFLYSKLTVDKSRWQQGNVFSCSVMHEALHNHYTQKSLSLSPGGGGGSGSGGSGGGSSGGGGSGGGGSGGGGSGGGGSGGGGSSSSGSTCPPCPAPEAAGGPSVFLFPPKPKDTLMISRTPEVTCVVVDVSHEDPEVKFNWYVDGVEVHNAKTKPREEQYNSTYRVVSVLTVLHQDWLNGKEYKCKVSNKALAAPIEKTISKAKGQPREPQVYTLPPSRDELTKNQVSLTCLVKGFYPSDIAVEWESNGQPENNYKTTPPVLDSDGSFFLYSKLTVDKSRWQQGNVFSCSVMHEALHNHYTQKSLSLSPG

SEQ ID NO: 165 - protein, 720 aa, synthetic construct
  REGION 1..720: note = _
DIQLTQSPAIMSASPGEKVTMTCRASSSVSYMNWYQQKSGTSPKRWIYDTSKVASGVPYRFSGSGSGTSYSLTISSMEAEDAATYYCQQWSSNPLTFGAGTKLELKGGSSGDIQMTQSPSSLSASVGDRVTITCRASQDVNTAVAWYQQKPGKAPKLLIYSASFLYSGVPSRFSGSRSGTDFTLTISSLQPEDFATYYCQQHYTTPPTFGQGTKVEIKGGGGSGGSGSGGGGSASGSGEVQLVESGGGLVQPGGSLRLSCAASGFNIKDTYIHWVRQAPGKGLEWVARIYPTNGYTRYADSVKGRFTISADTSKNTAYLQMNSLRAEDTAVYYCSRWGGDGFYAMDYWGQGTLVTVSSGGSSGDIKLQQSGAELARPGASVKMSCKTSGYTFTRYTMHWVKQRPGQGLEWIGYINPSRGYTNYNQKFKDKATLTTDKSSSTAYMQLSSLTSEDSAVYYCARYYDDHYSLDYWGQGTTLTVSSASGGSGGQPREPQVYTLPPSRDELTKNQVSLTCLVKGFYPSDIAVEWESNGQPENNYKTTPPVLDSDGSFFLYSKLTVDKSRWQQGNVFSCSVMHEALHNHYTQKSLSLSPGGGGSSGGGGSGGSGSGGSGSGQPREPQVYTLPPSRDELTKNQVSLTCLVKGFYPSDIAVEWESNGQPENNYKTTPPVLDSDGSFFLYSKLTVDKSRWQQGNVFSCSVMHEALHNHYTQKSLSLSPG

SEQ ID NO: 166 - protein, 722 aa, synthetic construct
  REGION 1..722: note = _
DIQLTQSPAIMSASPGEKVTMTCRASSSVSYMNWYQQKSGTSPKRWIYDTSKVASGVPYRFSGSGSGTSYSLTISSMEAEDAATYYCQQWSSNPLTFGAGTKLELKGGSSGDIQMTQSPSSLSASVGDRVTITCRASQDVNTAVAWYQQKPGKAPKLLIYSASFLYSGVPSRFSGSRSGTDFTLTISSLQPEDFATYYCQQHYTTPPTFGQGTKVEIKGGGGSGGSGSGGGGSASGSGEVQLVESGGGLVQPGGSLRLSCAASGFNIKDTYIHWVRQAPGKGLEWVARIYPTNGYTRYADSVKGRFTISADTSKNTAYLQMNSLRAEDTAVYYCSRWGGDGFYAMDYWGQGTLVTVSSGGSSGDIKLQQSGAELARPGASVKMSCKTSGYTFTRYTMHWVKQRPGQGLEWIGYINPSRGYTNYNQKFKDKATLTTDKSSSTAYMQLSSLTSEDSAVYYCARYYDDHYSLDYWGQGTTLTVSSASGGSGGQPREPQVYTLPPSRDELTKNQVSLTCLVKGFYPSDIAVEWESNGQPENNYKTTPPVLDSDGSFFLYSKLTVDKSRWQQGNVFSCSVMHEALHNHYTQKSLSLSPGGSGSSGGGGSGGSGSGGSGSSGGQPREPQVYTLPPSRDELTKNQVSLTCLVKGFYPSDIAVEWESNGQPENNYKTTPPVLDSDGSFFLYSKLTVDKSRWQQGNVFSCSVMHEALHNHYTQKSLSLSPG

SEQ ID NO: 167 - protein, 756 aa, synthetic construct
  REGION 1..756: note = _
DIQLTQSPAIMSASPGEKVTMTCRASSSVSYMNWYQQKSGTSPKRWIYDTSKVASGVPYRFSGSGSGTSYSLTISSMEAEDAATYYCQQWSSNPLTFGAGTKLELKGGSSGDIQMTQSPSSLSASVGDRVTITCRASQDVNTAVAWYQQKPGKAPKLLIYSASFLYSGVPSRFSGSRSGTDFTLTISSLQPEDFATYYCQQHYTTPPTFGQGTKVEIKGGGGSGGSGSGGGGSASGSGEVQLVESGGGLVQPGGSLRLSCAASGFNIKDTYIHWVRQAPGKGLEWVARIYPTNGYTRYADSVKGRFTISADTSKNTAYLQMNSLRAEDTAVYYCSRWGGDGFYAMDYWGQGTLVTVSSGGSSGDIKLQQSGAELARPGASVKMSCKTSGYTFTRYTMHWVKQRPGQGLEWIGYINPSRGYTNYNQKFKDKATLTTDKSSSTAYMQLSSLTSEDSAVYYCARYYDDHYSLDYWGQGTTLTVSSASGGSGSSGCPPCPAPEAAGGPSGQPREPQVYTLPPSRDELTKNQVSLTCLVKGFYPSDIAVEWESNGQPENNYKTTPPVLDSDGSFFLYSKLTVDKSRWQQGNVFSCSVMHEALHNHYTQKSLSLSPGGSGSSGGGGSGGSGSGGSGSSGSSGCPPCPAPEAAGGPSGQPREPQVYTLPPSRDELTKNQVSLTCLVKGFYPSDIAVEWESNGQPENNYKTTPPVLDSDGSFFLYSKLTVDKSRWQQGNVFSCSVMHEALHNHYTQKSLSLSPG

SEQ ID NO: 168 - protein, 752 aa, synthetic construct
  REGION 1..752: note = _
DIQLTQSPAIMSASPGEKVTMTCRASSSVSYMNWYQQKSGTSPKRWIYDTSKVASGVPYRFSGSGSGTSYSLTISSMEAEDAATYYCQQWSSNPLTFGAGTKLELKGGSSGDIQMTQSPSSLSASVGDRVTITCRASQDVNTAVAWYQQKPGKAPKLLIYSASFLYSGVPSRFSGSRSGTDFTLTISSLQPEDFATYYCQQHYTTPPTFGQGTKVEIKGGGGSGGSGSGGGGSASGSGEVQLVESGGGLVQPGGSLRLSCAASGFNIKDTYIHWVRQAPGKGLEWVARIYPTNGYTRYADSVKGRFTISADTSKNTAYLQMNSLRAEDTAVYYCSRWGGDGFYAMDYWGQGTLVTVSSGGSSGDIKLQQSGAELARPGASVKMSCKTSGYTFTRYTMHWVKQRPGQGLEWIGYINPSRGYTNYNQKFKDKATLTTDKSSSTAYMQLSSLTSEDSAVYYCARYYDDHYSLDYWGQGTTLTVSSASGGSGSCPPCPAPEAAGGSSGQPREPQVYTLPPSRDELTKNQVSLTCLVKGFYPSDIAVEWESNGQPENNYKTTPPVLDSDGSFFLYSKLTVDKSRWQQGNVFSCSVMHEALHNHYTQKSLSLSPGGSGSSGGGGSGGSGSGGSGSSGSCPPCPAPEAAGGSSGQPREPQVYTLPPSRDELTKNQVSLTCLVKGFYPSDIAVEWESNGQPENNYKTTPPVLDSDGSFFLYSKLTVDKSRWQQGNVFSCSVMHEALHNHYTQKSLSLSPG

SEQ ID NO: 169 - protein, 1204 aa, synthetic construct
  REGION 1..1204: note = _
DIQLTQSPAIMSASPGEKVTMTCRASSSVSYMNWYQQKSGTSPKRWIYDTSKVASGVPYRFSGSGSGTSYSLTISSMEAEDAATYYCQQWSSNPLTFGAGTKLELKGGSSGDIQMTQSPSSLSASVGDRVTITCRASQDVNTAVAWYQQKPGKAPKLLIYSASFLYSGVPSRFSGSRSGTDFTLTISSLQPEDFATYYCQQHYTTPPTFGQGTKVEIKGGGGSGGSGSGGGGSASGSGEVQLVESGGGLVQPGGSLRLSCAASGFNIKDTYIHWVRQAPGKGLEWVARIYPTNGYTRYADSVKGRFTISADTSKNTAYLQMNSLRAEDTAVYYCSRWGGDGFYAMDYWGQGTLVTVSSGGSSGDIKLQQSGAELARPGASVKMSCKTSGYTFTRYTMHWVKQRPGQGLEWIGYINPSRGYTNYNQKFKDKATLTTDKSSSTAYMQLSSLTSEDSAVYYCARYYDDHYSLDYWGQGTTLTVSSRTVAAPSVFIFPPSDEQLKSGTASVVCLLNNFYPREAKVQWKVDNALQSGNSQESVTEQDSKDSTYSLSSTLTLSKADYEKHKVYACEVTHQGLSSPVTKSFNRGECGGGGSGGSGSGGGGSASGSGASTKGPSVFPLAPSSKSTSGGTAALGCLVKDYFPEPVTVSWNSGALTSGVHTFPAVLQSSGLYSLSSVVTVPSSSLGTQTYICNVNHKPSNTKVDKKVEPKSCDKTHTCPPCPAPEAAGGPSVFLFPPKPKDTLMISRTPEVTCVVVDVSHEDPEVKFNWYVDGVEVHNAKTKPREEQYNSTYRVVSVLTVLHQDWLNGKEYKCKVSNKALAAPIEKTISKAKGQPREPQVYTLPPSRDELTKNQVSLTCLVKGFYPSDIAVEWESNGQPENNYKTTPPVLDSDGSFFLYSKLTVDKSRWQQGNVFSCSVMHEALHNHYTQKSLSLSPGGGGGSGSGGSGGGSSGGGGSGGGGSGGGGSGGGGSGGGGSDKTHTCPPCPAPEAAGGPSVFLFPPKPKDTLMISRTPEVTCVVVDVSHEDPEVKFNWYVDGVEVHNAKTKPREEQYNSTYRVVSVLTVLHQDWLNGKEYKCKVSNKALAAPIEKTISKAKGQPREPQVYTLPPSRDELTKNQVSLTCLVKGFYPSDIAVEWESNGQPENNYKTTPPVLDSDGSFFLYSKLTVDKSRWQQGNVFSCSVMHEALHNHYTQKSLSLSPG

SEQ ID NO: 170 - protein, 982 aa, synthetic construct
  REGION 1..982: note = _
DIQLTQSPAIMSASPGEKVTMTCRASSSVSYMNWYQQKSGTSPKRWIYDTSKVASGVPYRFSGSGSGTSYSLTISSMEAEDAATYYCQQWSSNPLTFGAGTKLELKGGSSGDIQMTQSPSSLSASVGDRVTITCRASQDVNTAVAWYQQKPGKAPKLLIYSASFLYSGVPSRFSGSRSGTDFTLTISSLQPEDFATYYCQQHYTTPPTFGQGTKVEIKGGGGSGGSGSGGGGSASGSGEVQLVESGGGLVQPGGSLRLSCAASGFNIKDTYIHWVRQAPGKGLEWVARIYPTNGYTRYADSVKGRFTISADTSKNTAYLQMNSLRAEDTAVYYCSRWGGDGFYAMDYWGQGTLVTVSSGGSSGDIKLQQSGAELARPGASVKMSCKTSGYTFTRYTMHWVKQRPGQGLEWIGYINPSRGYTNYNQKFKDKATLTTDKSSSTAYMQLSSLTSEDSAVYYCARYYDDHYSLDYWGQGTTLTVSSRTVAAPSVFIFPPSDEQLKSGTASVVCLLNNFYPREAKVQWKVDNALQSGNSQESVTEQDSKDSTYSLSSTLTLSKADYEKHKVYACEVTHQGLSSPVTKSFNRGECGGGGSGGSGSGGGGSASGSGASTKGPSVFPLAPSSKSTSGGTAALGCLVKDYFPEPVTVSWNSGALTSGVHTFPAVLQSSGLYSLSSVVTVPSSSLGTQTYICNVNHKPSNTKVDKKVEPKSCDKTHTCPPCPAPEAAGGPSGQPREPQVYTLPPSRDELTKNQVSLTCLVKGFYPSDIAVEWESNGQPENNYKTTPPVLDSDGSFFLYSKLTVDKSRWQQGNVFSCSVMHEALHNHYTQKSLSLSPGGSGSSGGGGSGGSGSGGSGSSGSSGCPPCPAPEAAGGPSGQPREPQVYTLPPSRDELTKNQVSLTCLVKGFYPSDIAVEWESNGQPENNYKTTPPVLDSDGSFFLYSKLTVDKSRWQQGNVFSCSVMHEALHNHYTQKSLSLSPG

SEQ ID NO: 171 - protein, 750 aa, synthetic construct
  REGION 1..750: note = _
DIQMTQSPSSLSASVGDRVTITCQASQNIYVWLNWYQQKPGKAPKLLIYKASNLHTGVPSRFSGSGSGTDFTLTISSLQPEDIATYYCQQGQTYPYTFGQGTKLEIKGGSSGDIVMTQTPLSLSVTPGQPASISCKSSQSLVHNNANTYLSWYLQKPGQSPQSLIYKVSNRFSGVPDRFSGSGSGTDFTLKISRVEAEDVGVYYCGQGTQYPFTFGSGTKVEIKGGSSGDIVLTQSPATLSLSPGERATISCRASQSVSSYGQGFMHWYQQKPGQPPRLLIYGASSRATGIPARFSGSGSGTDFTLTISPLEPEDFAVYYCQQNKEDPWTFGGGTKLEIKGGGGSGGSGSGGGGSASGSGQVQLVQSGAEVVKPGASVKVSCKASGYTFTSYAMHWVKEAPGQGLEWIGYIYPGQGGTNYNQKFQGRATLTADTSASTAYMELSSLRSEDTAVYFCARTGGLRRAYFTYWGQGTLVTVSSGGSSGQVQLVESGGGVVQPGRSLRLSCAASGFTFTKAWMHWVRQAPGKQLEWVAQIKDKSNSYATYYADSVKGRFTISRDDSKNTLYLQMNSLRAEDTAVYYCRGVYYALSPFDYWGQGTLVTVSSGGSSGQVQLVQSGAEVVKPGASVKVSCKASGYTFTSYYIHWVRQAPGQGLEWIGSIYPGNVNTNYAQKFQGRATLTVDTSISTAYMELSRLRSDDTAVYYCTRSHYGLDWNFDVWGKGTTVTVSSASGGSGDKTHTCPPCPAPE

SEQ ID NO: 172 - protein, 750 aa, synthetic construct
  REGION 1..750: note = _
DIQMTQSPSSLSASVGDRVTITCQASQNIYVWLNWYQQKPGKAPKLLIYKASNLHTGVPSRFSGSGSGTDFTLTISSLQPEDIATYYCQQGQTYPYTFGQGTKLEIKGGSSGQVQLVESGGGVVQPGRSLRLSCAASGFTFTKAWMHWVRQAPGKQLEWVAQIKDKSNSYATYYADSVKGRFTISRDDSKNTLYLQMNSLRAEDTAVYYCRGVYYALSPFDYWGQGTLVTVSSGGSSGDIVLTQSPATLSLSPGERATISCRASQSVSSYGQGFMHWYQQKPGQPPRLLIYGASSRATGIPARFSGSGSGTDFTLTISPLEPEDFAVYYCQQNKEDPWTFGGGTKLEIKGGGGSGGSGSGGGGSASGSGQVQLVQSGAEVVKPGASVKVSCKASGYTFTSYAMHWVKEAPGQGLEWIGYIYPGQGGTNYNQKFQGRATLTADTSASTAYMELSSLRSEDTAVYFCARTGGLRRAYFTYWGQGTLVTVSSGGSSGDIVMTQTPLSLSVTPGQPASISCKSSQSLVHNNANTYLSWYLQKPGQSPQSLIYKVSNRFSGVPDRFSGSGSGTDFTLKISRVEAEDVGVYYCGQGTQYPFTFGSGTKVEIKGGSSGQVQLVQSGAEVVKPGASVKVSCKASGYTFTSYYIHWVRQAPGQGLEWIGSIYPGNVNTNYAQKFQGRATLTVDTSISTAYMELSRLRSDDTAVYYCTRSHYGLDWNFDVWGKGTTVTVSSASGGSGDKTHTCPPCPAPE

SEQ ID NO: 173 - protein, 750 aa, synthetic construct
  REGION 1..750: note = _
DIVMTQTPLSLSVTPGQPASISCKSSQSLVHNNANTYLSWYLQKPGQSPQSLIYKVSNRFSGVPDRFSGSGSGTDFTLKISRVEAEDVGVYYCGQGTQYPFTFGSGTKVEIKGGSSGDIQMTQSPSSLSASVGDRVTITCQASQNIYVWLNWYQQKPGKAPKLLIYKASNLHTGVPSRFSGSGSGTDFTLTISSLQPEDIATYYCQQGQTYPYTFGQGTKLEIKGGSSGDIVLTQSPATLSLSPGERATISCRASQSVSSYGQGFMHWYQQKPGQPPRLLIYGASSRATGIPARFSGSGSGTDFTLTISPLEPEDFAVYYCQQNKEDPWTFGGGTKLEIKGGGGSGGSGSGGGGSASGSGQVQLVQSGAEVVKPGASVKVSCKASGYTFTSYAMHWVKEAPGQGLEWIGYIYPGQGGTNYNQKFQGRATLTADTSASTAYMELSSLRSEDTAVYFCARTGGLRRAYFTYWGQGTLVTVSSGGSSGQVQLVQSGAEVVKPGASVKVSCKASGYTFTSYYIHWVRQAPGQGLEWIGSIYPGNVNTNYAQKFQGRATLTVDTSISTAYMELSRLRSDDTAVYYCTRSHYGLDWNFDVWGKGTTVTVSSGGSSGQVQLVESGGGVVQPGRSLRLSCAASGFTFTKAWMHWVRQAPGKQLEWVAQIKDKSNSYATYYADSVKGRFTISRDDSKNTLYLQMNSLRAEDTAVYYCRGVYYALSPFDYWGQGTLVTVSSASGGSGDKTHTCPPCPAPE

SEQ ID NO: 174 - protein, 750 aa, synthetic construct
  REGION 1..750: note = _
DIVMTQTPLSLSVTPGQPASISCKSSQSLVHNNANTYLSWYLQKPGQSPQSLIYKVSNRFSGVPDRFSGSGSGTDFTLKISRVEAEDVGVYYCGQGTQYPFTFGSGTKVEIKGGSSGDIVLTQSPATLSLSPGERATISCRASQSVSSYGQGFMHWYQQKPGQPPRLLIYGASSRATGIPARFSGSGSGTDFTLTISPLEPEDFAVYYCQQNKEDPWTFGGGTKLEIKGGSSGDIQMTQSPSSLSASVGDRVTITCQASQNIYVWLNWYQQKPGKAPKLLIYKASNLHTGVPSRFSGSGSGTDFTLTISSLQPEDIATYYCQQGQTYPYTFGQGTKLEIKGGGGSGGSGSGGGGSASGSGQVQLVQSGAEVVKPGASVKVSCKASGYTFTSYYIHWVRQAPGQGLEWIGSIYPGNVNTNYAQKFQGRATLTVDTSISTAYMELSRLRSDDTAVYYCTRSHYGLDWNFDVWGKGTTVTVSSGGSSGQVQLVQSGAEVVKPGASVKVSCKASGYTFTSYAMHWVKEAPGQGLEWIGYIYPGQGGTNYNQKFQGRATLTADTSASTAYMELSSLRSEDTAVYFCARTGGLRRAYFTYWGQGTLVTVSSGGSSGQVQLVESGGGVVQPGRSLRLSCAASGFTFTKAWMHWVRQAPGKQLEWVAQIKDKSNSYATYYADSVKGRFTISRDDSKNTLYLQMNSLRAEDTAVYYCRGVYYALSPFDYWGQGTLVTVSSASGGSGDKTHTCPPCPAPE

SEQ ID NO: 175 - protein, 1229 aa, synthetic construct
  REGION 1..1229: note = _
DIQMTQSPSSLSASVGDRVTITCQASQNIYVWLNWYQQKPGKAPKLLIYKASNLHTGVPSRFSGSGSGTDFTLTISSLQPEDIATYYCQQGQTYPYTFGQGTKLEIKGGSSGDIVMTQTPLSLSVTPGQPASISCKSSQSLVHNNANTYLSWYLQKPGQSPQSLIYKVSNRFSGVPDRFSGSGSGTDFTLKISRVEAEDVGVYYCGQGTQYPFTFGSGTKVEIKGGSSGDIVLTQSPATLSLSPGERATISCRASQSVSSYGQGFMHWYQQKPGQPPRLLIYGASSRATGIPARFSGSGSGTDFTLTISPLEPEDFAVYYCQQNKEDPWTFGGGTKLEIKGGGGSGGSGSGGGGSASGSGQVQLVQSGAEVVKPGASVKVSCKASGYTFTSYAMHWVKEAPGQGLEWIGYIYPGQGGTNYNQKFQGRATLTADTSASTAYMELSSLRSEDTAVYFCARTGGLRRAYFTYWGQGTLVTVSSGGSSGQVQLVESGGGVVQPGRSLRLSCAASGFTFTKAWMHWVRQAPGKQLEWVAQIKDKSNSYATYYADSVKGRFTISRDDSKNTLYLQMNSLRAEDTAVYYCRGVYYALSPFDYWGQGTLVTVSSGGSSGQVQLVQSGAEVVKPGASVKVSCKASGYTFTSYYIHWVRQAPGQGLEWIGSIYPGNVNTNYAQKFQGRATLTVDTSISTAYMELSRLRSDDTAVYYCTRSHYGLDWNFDVWGKGTTVTVSSASGGSGDKTHTCPPCPAPEAAGGPSVFLFPPKPKDTLMISRTPEVTCVVVDVSHEDPEVKFNWYVDGVEVHNAKTKPREEQYNSTYRVVSVLTVLHQDWLNGKEYKCKVSNKALAAPIEKTISKAKGQPREPQVYTLPPSRDELTKNQVSLTCLVKGFYPSDIAVEWESNGQPENNYKTTPPVLDSDGSFFLYSKLTVDKSRWQQGNVFSCSVMHEALHNHYTQKSLSLSPGGGGGSGSGGSGGGSSGGGGSGGGGSGGGGSGGGGSGGGGSDKTHTCPPCPAPEAAGGPSVFLFPPKPKDTLMISRTPEVTCVVVDVSHEDPEVKFNWYVDGVEVHNAKTKPREEQYNSTYRVVSVLTVLHQDWLNGKEYKCKVSNKALAAPIEKTISKAKGQPREPQVYTLPPSRDELTKNQVSLTCLVKGFYPSDIAVEWESNGQPENNYKTTPPVLDSDGSFFLYSKLTVDKSRWQQGNVFSCSVMHEALHNHYTQKSLSLSPG

SEQ ID NO: 176 - protein, 1228 aa, synthetic construct
  REGION 1..1228: note = _
DIQMTQSPSSLSASVGDRVTITCQASQNIYVWLNWYQQKPGKAPKLLIYKASNLHTGVPSRFSGSGSGTDFTLTISSLQPEDIATYYCQQGQTYPYTFGQGTKLEIKGGSSGDIVMTQTPLSLSVTPGQPASISCKSSQSLVHNNANTYLSWYLQKPGQSPQSLIYKVSNRFSGVPDRFSGSGSGTDFTLKISRVEAEDVGVYYCGQGTQYPFTFGSGTKVEIKGGSSGDIVLTQSPATLSLSPGERATISCRASQSVSSYGQGFMHWYQQKPGQPPRLLIYGASSRATGIPARFSGSGSGTDFTLTISPLEPEDFAVYYCQQNKEDPWTFGGGTKLEIKGGGGSGGSGSGGGGSASGSGQVQLVQSGAEVVKPGASVKVSCKASGYTFTSYAMHWVKEAPGQGLEWIGYIYPGQGGTNYNQKFQGRATLTADTSASTAYMELSSLRSEDTAVYFCARTGGLRRAYFTYWGQGTLVTVSSGGSSGQVQLVESGGGVVQPGRSLRLSCAASGFTFTKAWMHWVRQAPGKQLEWVAQIKDKSNSYATYYADSVKGRFTISRDDSKNTLYLQMNSLRAEDTAVYYCRGVYYALSPFDYWGQGTLVTVSSGGSSGQVQLVQSGAEVVKPGASVKVSCKASGYTFTSYYIHWVRQAPGQGLEWIGSIYPGNVNTNYAQKFQGRATLTVDTSISTAYMELSRLRSDDTAVYYCTRSHYGLDWNFDVWGKGTTVTVSSASGGSGDKTHTCPPCPAPEAAGGPSVFLFPPKPKDTLMISRTPEVTCVVVDVSHEDPEVKFNWYVDGVEVHNAKTKPREEQYNSTYRVVSVLTVLHQDWLNGKEYKCKVSNKALAAPIEKTISKAKGQPREPQVYTLPPSRDELTKNQVSLTCLVKGFYPSDIAVEWESNGQPENNYKTTPPVLDSDGSFFLYSKLTVDKSRWQQGNVFSCSVMHEALHNHYTQKSLSLSPGGGGGSGSGGSGGGSSGGGGSGGGGSGGGGSGGGGSGGGGSSSSTCPPCPAPEAAGGPSVFLFPPKPKDTLMISRTPEVTCVVVDVSHEDPEVKFNWYVDGVEVHNAKTKPREEQYNSTYRVVSVLTVLHQDWLNGKEYKCKVSNKALAAPIEKTISKAKGQPREPQVYTLPPSRDELTKNQVSLTCLVKGFYPSDIAVEWESNGQPENNYKTTPPVLDSDGSFFLYSKLTVDKSRWQQGNVFSCSVMHEALHNHYTQKSLSLSPG

SEQ ID NO: 177 - protein, 1230 aa, synthetic construct
  REGION 1..1230: note = _
DIQMTQSPSSLSASVGDRVTITCQASQNIYVWLNWYQQKPGKAPKLLIYKASNLHTGVPSRFSGSGSGTDFTLTISSLQPEDIATYYCQQGQTYPYTFGQGTKLEIKGGSSGDIVMTQTPLSLSVTPGQPASISCKSSQSLVHNNANTYLSWYLQKPGQSPQSLIYKVSNRFSGVPDRFSGSGSGTDFTLKISRVEAEDVGVYYCGQGTQYPFTFGSGTKVEIKGGSSGDIVLTQSPATLSLSPGERATISCRASQSVSSYGQGFMHWYQQKPGQPPRLLIYGASSRATGIPARFSGSGSGTDFTLTISPLEPEDFAVYYCQQNKEDPWTFGGGTKLEIKGGGGSGGSGSGGGGSASGSGQVQLVQSGAEVVKPGASVKVSCKASGYTFTSYAMHWVKEAPGQGLEWIGYIYPGQGGTNYNQKFQGRATLTADTSASTAYMELSSLRSEDTAVYFCARTGGLRRAYFTYWGQGTLVTVSSGGSSGQVQLVESGGGVVQPGRSLRLSCAASGFTFTKAWMHWVRQAPGKQLEWVAQIKDKSNSYATYYADSVKGRFTISRDDSKNTLYLQMNSLRAEDTAVYYCRGVYYALSPFDYWGQGTLVTVSSGGSSGQVQLVQSGAEVVKPGASVKVSCKASGYTFTSYYIHWVRQAPGQGLEWIGSIYPGNVNTNYAQKFQGRATLTVDTSISTAYMELSRLRSDDTAVYYCTRSHYGLDWNFDVWGKGTTVTVSSASGGSGDKTHTCPPCPAPEAAGGPSVFLFPPKPKDTLMISRTPEVTCVVVDVSHEDPEVKFNWYVDGVEVHNAKTKPREEQYNSTYRVVSVLTVLHQDWLNGKEYKCKVSNKALAAPIEKTISKAKGQPREPQVYTLPPSRDELTKNQVSLTCLVKGFYPSDIAVEWESNGQPENNYKTTPPVLDSDGSFFLYSKLTVDKSRWQQGNVFSCSVMHEALHNHYTQKSLSLSPGGGGGSGSGGSGGGSSGGGGSGGGGSGGGGSGGGGSGGGGSSSSGSTCPPCPAPEAAGGPSVFLFPPKPKDTLMISRTPEVTCVVVDVSHEDPEVKFNWYVDGVEVHNAKTKPREEQYNSTYRVVSVLTVLHQDWLNGKEYKCKVSNKALAAPIEKTISKAKGQPREPQVYTLPPSRDELTKNQVSLTCLVKGFYPSDIAVEWESNGQPENNYKTTPPVLDSDGSFFLYSKLTVDKSRWQQGNVFSCSVMHEALHNHYTQKSLSLSPG

SEQ ID NO: 178 - protein, 969 aa, synthetic construct
  REGION 1..969: note = _
DIQMTQSPSSLSASVGDRVTITCQASQNIYVWLNWYQQKPGKAPKLLIYKASNLHTGVPSRFSGSGSGTDFTLTISSLQPEDIATYYCQQGQTYPYTFGQGTKLEIKGGSSGDIVMTQTPLSLSVTPGQPASISCKSSQSLVHNNANTYLSWYLQKPGQSPQSLIYKVSNRFSGVPDRFSGSGSGTDFTLKISRVEAEDVGVYYCGQGTQYPFTFGSGTKVEIKGGSSGDIVLTQSPATLSLSPGERATISCRASQSVSSYGQGFMHWYQQKPGQPPRLLIYGASSRATGIPARFSGSGSGTDFTLTISPLEPEDFAVYYCQQNKEDPWTFGGGTKLEIKGGGGSGGSGSGGGGSASGSGQVQLVQSGAEVVKPGASVKVSCKASGYTFTSYAMHWVKEAPGQGLEWIGYIYPGQGGTNYNQKFQGRATLTADTSASTAYMELSSLRSEDTAVYFCARTGGLRRAYFTYWGQGTLVTVSSGGSSGQVQLVESGGGVVQPGRSLRLSCAASGFTFTKAWMHWVRQAPGKQLEWVAQIKDKSNSYATYYADSVKGRFTISRDDSKNTLYLQMNSLRAEDTAVYYCRGVYYALSPFDYWGQGTLVTVSSGGSSGQVQLVQSGAEVVKPGASVKVSCKASGYTFTSYYIHWVRQAPGQGLEWIGSIYPGNVNTNYAQKFQGRATLTVDTSISTAYMELSRLRSDDTAVYYCTRSHYGLDWNFDVWGKGTTVTVSSASGGSGGQPREPQVYTLPPSRDELTKNQVSLTCLVKGFYPSDIAVEWESNGQPENNYKTTPPVLDSDGSFFLYSKLTVDKSRWQQGNVFSCSVMHEALHNHYTQKSLSLSPGGGGSSGGGGSGGSGSGGSGSGQPREPQVYTLPPSRDELTKNQVSLTCLVKGFYPSDIAVEWESNGQPENNYKTTPPVLDSDGSFFLYSKLTVDKSRWQQGNVFSCSVMHEALHNHYTQKSLSLSPG

SEQ ID NO: 179 - protein, 971 aa, synthetic construct
  REGION 1..971: note = _
DIQMTQSPSSLSASVGDRVTITCQASQNIYVWLNWYQQKPGKAPKLLIYKASNLHTGVPSRFSGSGSGTDFTLTISSLQPEDIATYYCQQGQTYPYTFGQGTKLEIKGGSSGDIVMTQTPLSLSVTPGQPASISCKSSQSLVHNNANTYLSWYLQKPGQSPQSLIYKVSNRFSGVPDRFSGSGSGTDFTLKISRVEAEDVGVYYCGQGTQYPFTFGSGTKVEIKGGSSGDIVLTQSPATLSLSPGERATISCRASQSVSSYGQGFMHWYQQKPGQPPRLLIYGASSRATGIPARFSGSGSGTDFTLTISPLEPEDFAVYYCQQNKEDPWTFGGGTKLEIKGGGGSGGSGSGGGGSASGSGQVQLVQSGAEVVKPGASVKVSCKASGYTFTSYAMHWVKEAPGQGLEWIGYIYPGQGGTNYNQKFQGRATLTADTSASTAYMELSSLRSEDTAVYFCARTGGLRRAYFTYWGQGTLVTVSSGGSSGQVQLVESGGGVVQPGRSLRLSCAASGFTFTKAWMHWVRQAPGKQLEWVAQIKDKSNSYATYYADSVKGRFTISRDDSKNTLYLQMNSLRAEDTAVYYCRGVYYALSPFDYWGQGTLVTVSSGGSSGQVQLVQSGAEVVKPGASVKVSCKASGYTFTSYYIHWVRQAPGQGLEWIGSIYPGNVNTNYAQKFQGRATLTVDTSISTAYMELSRLRSDDTAVYYCTRSHYGLDWNFDVWGKGTTVTVSSASGGSGGQPREPQVYTLPPSRDELTKNQVSLTCLVKGFYPSDIAVEWESNGQPENNYKTTPPVLDSDGSFFLYSKLTVDKSRWQQGNVFSCSVMHEALHNHYTQKSLSLSPGGSGSSGGGGSGGSGSGGSGSSGGQPREPQVYTLPPSRDELTKNQVSLTCLVKGFYPSDIAVEWESNGQPENNYKTTPPVLDSDGSFFLYSKLTVDKSRWQQGNVFSCSVMHEALHNHYTQKSLSLSPG

SEQ ID NO: 180 - protein, 969 aa, synthetic construct
  REGION 1..969: note = _
DIQMTQSPSSLSASVGDRVTITCQASQNIYVWLNWYQQKPGKAPKLLIYKASNLHTGVPSRFSGSGSGTDFTLTISSLQPEDIATYYCQQGQTYPYTFGQGTKLEIKGGSSGDIVMTQTPLSLSVTPGQPASISCKSSQSLVHNNANTYLSWYLQKPGQSPQSLIYKVSNRFSGVPDRFSGSGSGTDFTLKISRVEAEDVGVYYCGQGTQYPFTFGSGTKVEIKGGSSGDIVLTQSPATLSLSPGERATISCRASQSVSSYGQGFMHWYQQKPGQPPRLLIYGASSRATGIPARFSGSGSGTDFTLTISPLEPEDFAVYYCQQNKEDPWTFGGGTKLEIKGGGGSGGSGSGGGGSASGSGQVQLVQSGAEVVKPGASVKVSCKASGYTFTSYAMHWVKEAPGQGLEWIGYIYPGQGGTNYNQKFQGRATLTADTSASTAYMELSSLRSEDTAVYFCARTGGLRRAYFTYWGQGTLVTVSSGGSSGQVQLVESGGGVVQPGRSLRLSCAASGFTFTKAWMHWVRQAPGKQLEWVAQIKDKSNSYATYYADSVKGRFTISRDDSKNTLYLQMNSLRAEDTAVYYCRGVYYALSPFDYWGQGTLVTVSSGGSSGQVQLVQSGAEVVKPGASVKVSCKASGYTFTSYYIHWVRQAPGQGLEWIGSIYPGNVNTNYAQKFQGRATLTVDTSISTAYMELSRLRSDDTAVYYCTRSHYGLDWNFDVWGKGTTVTVSSASGGSGGQPREPQVCTLPPSRDELTKNQVSLTCLVKGFYPSDIAVEWESNGQPENNYKTTPPVLDSDGSFFLYSKLTVDKSRWQQGNVFSCSVMHEALHNHYTQKSLSLSPGGGGSSGGSGSGGSGSGGSGSGQPREPQVYTLPPCRDELTKNQVSLTCLVKGFYPSDIAVEWESNGQPENNYKTTPPVLDSDGSFFLYSKLTVDKSRWQQGNVFSCSVMHEALHNHYTQKSLSLSPG

SEQ ID NO: 181 - protein, 971 aa, synthetic construct
  REGION 1..971: note = _
DIQMTQSPSSLSASVGDRVTITCQASQNIYVWLNWYQQKPGKAPKLLIYKASNLHTGVPSRFSGSGSGTDFTLTISSLQPEDIATYYCQQGQTYPYTFGQGTKLEIKGGSSGDIVMTQTPLSLSVTPGQPASISCKSSQSLVHNNANTYLSWYLQKPGQSPQSLIYKVSNRFSGVPDRFSGSGSGTDFTLKISRVEAEDVGVYYCGQGTQYPFTFGSGTKVEIKGGSSGDIVLTQSPATLSLSPGERATISCRASQSVSSYGQGFMHWYQQKPGQPPRLLIYGASSRATGIPARFSGSGSGTDFTLTISPLEPEDFAVYYCQQNKEDPWTFGGGTKLEIKGGGGSGGSGSGGGGSASGSGQVQLVQSGAEVVKPGASVKVSCKASGYTFTSYAMHWVKEAPGQGLEWIGYIYPGQGGTNYNQKFQGRATLTADTSASTAYMELSSLRSEDTAVYFCARTGGLRRAYFTYWGQGTLVTVSSGGSSGQVQLVESGGGVVQPGRSLRLSCAASGFTFTKAWMHWVRQAPGKQLEWVAQIKDKSNSYATYYADSVKGRFTISRDDSKNTLYLQMNSLRAEDTAVYYCRGVYYALSPFDYWGQGTLVTVSSGGSSGQVQLVQSGAEVVKPGASVKVSCKASGYTFTSYYIHWVRQAPGQGLEWIGSIYPGNVNTNYAQKFQGRATLTVDTSISTAYMELSRLRSDDTAVYYCTRSHYGLDWNFDVWGKGTTVTVSSASGGSGGQPREPQVCTLPPSRDELTKNQVSLTCLVKGFYPSDIAVEWESNGQPENNYKTTPPVLDSDGSFFLYSKLTVDKSRWQQGNVFSCSVMHEALHNHYTQKSLSLSPGSGGSSGGSGSGGSGSGGSGSSGGQPREPQVYTLPPCRDELTKNQVSLTCLVKGFYPSDIAVEWESNGQPENNYKTTPPVLDSDGSFFLYSKLTVDKSRWQQGNVFSCSVMHEALHNHYTQKSLSLSPG

SEQ ID NO: 182 - protein, 1005 aa, synthetic construct
  REGION 1..1005: note = _
DIQMTQSPSSLSASVGDRVTITCQASQNIYVWLNWYQQKPGKAPKLLIYKASNLHTGVPSRFSGSGSGTDFTLTISSLQPEDIATYYCQQGQTYPYTFGQGTKLEIKGGSSGDIVMTQTPLSLSVTPGQPASISCKSSQSLVHNNANTYLSWYLQKPGQSPQSLIYKVSNRFSGVPDRFSGSGSGTDFTLKISRVEAEDVGVYYCGQGTQYPFTFGSGTKVEIKGGSSGDIVLTQSPATLSLSPGERATISCRASQSVSSYGQGFMHWYQQKPGQPPRLLIYGASSRATGIPARFSGSGSGTDFTLTISPLEPEDFAVYYCQQNKEDPWTFGGGTKLEIKGGGGSGGSGSGGGGSASGSGQVQLVQSGAEVVKPGASVKVSCKASGYTFTSYAMHWVKEAPGQGLEWIGYIYPGQGGTNYNQKFQGRATLTADTSASTAYMELSSLRSEDTAVYFCARTGGLRRAYFTYWGQGTLVTVSSGGSSGQVQLVESGGGVVQPGRSLRLSCAASGFTFTKAWMHWVRQAPGKQLEWVAQIKDKSNSYATYYADSVKGRFTISRDDSKNTLYLQMNSLRAEDTAVYYCRGVYYALSPFDYWGQGTLVTVSSGGSSGQVQLVQSGAEVVKPGASVKVSCKASGYTFTSYYIHWVRQAPGQGLEWIGSIYPGNVNTNYAQKFQGRATLTVDTSISTAYMELSRLRSDDTAVYYCTRSHYGLDWNFDVWGKGTTVTVSSASGGSGSSGCPPCPAPEAAGGPSGQPREPQVYTLPPSRDELTKNQVSLTCLVKGFYPSDIAVEWESNGQPENNYKTTPPVLDSDGSFFLYSKLTVDKSRWQQGNVFSCSVMHEALHNHYTQKSLSLSPGGSGSSGGGGSGGSGSGGSGSSGSSGCPPCPAPEAAGGPSGQPREPQVYTLPPSRDELTKNQVSLTCLVKGFYPSDIAVEWESNGQPENNYKTTPPVLDSDGSFFLYSKLTVDKSRWQQGNVFSCSVMHEALHNHYTQKSLSLSPG

SEQ ID NO: 183 - protein, 1001 aa, synthetic construct
  REGION 1..1001: note = _
DIQMTQSPSSLSASVGDRVTITCQASQNIYVWLNWYQQKPGKAPKLLIYKASNLHTGVPSRFSGSGSGTDFTLTISSLQPEDIATYYCQQGQTYPYTFGQGTKLEIKGGSSGDIVMTQTPLSLSVTPGQPASISCKSSQSLVHNNANTYLSWYLQKPGQSPQSLIYKVSNRFSGVPDRFSGSGSGTDFTLKISRVEAEDVGVYYCGQGTQYPFTFGSGTKVEIKGGSSGDIVLTQSPATLSLSPGERATISCRASQSVSSYGQGFMHWYQQKPGQPPRLLIYGASSRATGIPARFSGSGSGTDFTLTISPLEPEDFAVYYCQQNKEDPWTFGGGTKLEIKGGGGSGGSGSGGGGSASGSGQVQLVQSGAEVVKPGASVKVSCKASGYTFTSYAMHWVKEAPGQGLEWIGYIYPGQGGTNYNQKFQGRATLTADTSASTAYMELSSLRSEDTAVYFCARTGGLRRAYFTYWGQGTLVTVSSGGSSGQVQLVESGGGVVQPGRSLRLSCAASGFTFTKAWMHWVRQAPGKQLEWVAQIKDKSNSYATYYADSVKGRFTISRDDSKNTLYLQMNSLRAEDTAVYYCRGVYYALSPFDYWGQGTLVTVSSGGSSGQVQLVQSGAEVVKPGASVKVSCKASGYTFTSYYIHWVRQAPGQGLEWIGSIYPGNVNTNYAQKFQGRATLTVDTSISTAYMELSRLRSDDTAVYYCTRSHYGLDWNFDVWGKGTTVTVSSASGGSGSCPPCPAPEAAGGSSGQPREPQVYTLPPSRDELTKNQVSLTCLVKGFYPSDIAVEWESNGQPENNYKTTPPVLDSDGSFFLYSKLTVDKSRWQQGNVFSCSVMHEALHNHYTQKSLSLSPGGSGSSGGGGSGGSGSGGSGSSGSCPPCPAPEAAGGSSGQPREPQVYTLPPSRDELTKNQVSLTCLVKGFYPSDIAVEWESNGQPENNYKTTPPVLDSDGSFFLYSKLTVDKSRWQQGNVFSCSVMHEALHNHYTQKSLSLSPG

SEQ ID NO: 184 - protein, 963 aa, synthetic construct
  REGION 1..963: note = _
DIQMTQSPSSLSASVGDRVTITCQASQNIYVWLNWYQQKPGKAPKLLIYKASNLHTGVPSRFSGSGSGTDFTLTISSLQPEDIATYYCQQGQTYPYTFGQGTKLEIKGGSSGDIVMTQTPLSLSVTPGQPASISCKSSQSLVHNNANTYLSWYLQKPGQSPQSLIYKVSNRFSGVPDRFSGSGSGTDFTLKISRVEAEDVGVYYCGQGTQYPFTFGSGTKVEIKGGSSGDIVLTQSPATLSLSPGERATISCRASQSVSSYGQGFMHWYQQKPGQPPRLLIYGASSRATGIPARFSGSGSGTDFTLTISPLEPEDFAVYYCQQNKEDPWTFGGGTKLEIKGGGGSGGSGSGGGGSASGSGQVQLVQSGAEVVKPGASVKVSCKASGYTFTSYAMHWVKEAPGQGLEWIGYIYPGQGGTNYNQKFQGRATLTADTSASTAYMELSSLRSEDTAVYFCARTGGLRRAYFTYWGQGTLVTVSSGGSSGQVQLVESGGGVVQPGRSLRLSCAASGFTFTKAWMHWVRQAPGKQLEWVAQIKDKSNSYATYYADSVKGRFTISRDDSKNTLYLQMNSLRAEDTAVYYCRGVYYALSPFDYWGQGTLVTVSSGGSSGQVQLVQSGAEVVKPGASVKVSCKASGYTFTSYYIHWVRQAPGQGLEWIGSIYPGNVNTNYAQKFQGRATLTVDTSISTAYMELSRLRSDDTAVYYCTRSHYGLDWNFDVWGKGTTVTVSSASGGSGDKTHTCPPCPAPEAAGGPSVFLFPPKPKDTLMISRTPEVTCVVVDVSHEDPEVKFNWYVDGVEVHNAKTKPREEQYNSTYRVVSVLTVLHQDWLNGKEYKCKVSNKALAAPIEKTISKAKGQPREPQVCTLPPSRDELTKNQVSLSCAVKGFYPSDIAVEWESNGQPENNYKTTPPVLDSDGSFFLVSKLTVDKSRWQQGNVFSCSVMHEALHNHYTQKSLSLSPG

SEQ ID NO: 185 - protein, 592 aa, synthetic construct
  REGION 1..592: note = _
DIQLTQSPASLAVSLGQRATISCKASQSVDYDGDSYLNWYQQIPGQPPKLLIYDASNLVSGIPPRFSGSGSGTDFTLNIHPVEKVDAATYHCQQSTEDPWTFGGGTKLEIKGGGGSGGSGSGGGGSASGSGQVQLQQSGAELVRPGSSVKISCKASGYAFSSYWMNWVKQRPGQGLEWIGQIWPGDGDTNYNGKFKGKATLTADESSSTAYMQLSSLASEDSAVYFCARRETTTVGRYYYAMDYWGQGTTVTVSSASGGSTVAAPSVFIFPPSDEQLKSGTASVVCLLNNFYPREAKVQWKVDNALQSGNSQESVTEQDSKDSTYSLSSTLTLSKADYEKHKVYACEVTHQGLSSPVTKSFNRGECDKTHTCPPCPAPEAAGGPSVFLFPPKPKDTLMISRTPEVTCVVVDVSHEDPEVKFNWYVDGVEVHNAKTKPREEQYNSTYRVVSVLTVLHQDWLNGKEYKCKVSNKALAAPIEKTISKAKGQPREPQVYTLPPCRDELTKNQVSLWCLVKGFYPSDIAVEWESNGQPENNYKTTPPVLDSDGSFFLYSKLTVDKSRWQQGNVFSCSVMHEALHNHYTQKSLSLSPG

SEQ ID NO: 186 - protein, 725 aa, synthetic construct
  REGION 1..725: note = _
DIQLTQSPASLAVSLGQRATISCKASQSVDYDGDSYLNWYQQIPGQPPKLLIYDASNLVSGIPPRFSGSGSGTDFTLNIHPVEKVDAATYHCQQSTEDPWTFGGGTKLEIKGGSSGDIVLTQSPAILSASPGEKVTMTCRASSSVNYMDWYQKKPGSSPKPWIYATSNLASGVPARFSGSGSGTSYSLTISRVEAEDAATYYCQQWSFNPPTFGGGTKLEIKGGGGSGGSGSGGGGSASGSGEVQLQQSGAELVKPGASVKMSCKASGYTFTSYNMHWVKQTPGQGLEWIGAIYPGNGDTSYNQKFKGKATLTADKSSSTAYMQLSSLTSEDSADYYCARSNYYGSSYWFFDVWGAGTTVTVSSGGSSGQVQLQQSGAELVRPGSSVKISCKASGYAFSSYWMNWVKQRPGQGLEWIGQIWPGDGDTNYNGKFKGKATLTADESSSTAYMQLSSLASEDSAVYFCARRETTTVGRYYYAMDYWGQGTTVTVSSASGGSGDKTHTCPPCPAPEAAGGPSVFLFPPKPKDTLMISRTPEVTCVVVDVSHEDPEVKFNWYVDGVEVHNAKTKPREEQYNSTYRVVSVLTVLHQDWLNGKEYKCKVSNKALAAPIEKTISKAKGQPREPQVYTLPPCRDELTKNQVSLWCLVKGFYPSDIAVEWESNGQPENNYKTTPPVLDSDGSFFLYSKLTVDKSRWQQGNVFSCSVMHEALHNHYTQKSLSLSPG

SEQ ID NO: 187 - protein, 725 aa, synthetic construct
  REGION 1..725: note = _
DIVLTQSPAILSASPGEKVTMTCRASSSVNYMDWYQKKPGSSPKPWIYATSNLASGVPARFSGSGSGTSYSLTISRVEAEDAATYYCQQWSFNPPTFGGGTKLEIKGGSSGDIQLTQSPASLAVSLGQRATISCKASQSVDYDGDSYLNWYQQIPGQPPKLLIYDASNLVSGIPPRFSGSGSGTDFTLNIHPVEKVDAATYHCQQSTEDPWTFGGGTKLEIKGGGGSGGSGSGGGGSASGSGQVQLQQSGAELVRPGSSVKISCKASGYAFSSYWMNWVKQRPGQGLEWIGQIWPGDGDTNYNGKFKGKATLTADESSSTAYMQLSSLASEDSAVYFCARRETTTVGRYYYAMDYWGQGTTVTVSSGGSSGEVQLQQSGAELVKPGASVKMSCKASGYTFTSYNMHWVKQTPGQGLEWIGAIYPGNGDTSYNQKFKGKATLTADKSSSTAYMQLSSLTSEDSADYYCARSNYYGSSYWFFDVWGAGTTVTVSSASGGSGDKTHTCPPCPAPEAAGGPSVFLFPPKPKDTLMISRTPEVTCVVVDVSHEDPEVKFNWYVDGVEVHNAKTKPREEQYNSTYRVVSVLTVLHQDWLNGKEYKCKVSNKALAAPIEKTISKAKGQPREPQVYTLPPCRDELTKNQVSLWCLVKGFYPSDIAVEWESNGQPENNYKTTPPVLDSDGSFFLYSKLTVDKSRWQQGNVFSCSVMHEALHNHYTQKSLSLSPG

SEQ ID NO: 188 - protein, 720 aa, synthetic construct
  REGION 1..720: note = _
SDISVAPGETARISCGEKSLGSRAVQWYQHRAGQAPSLIIYNNQDRPSGIPERFSGSPDSPFGTTATLTITSVEAGDEADYYCHIWDSRVPTKWVFGGGTTLTVLGGSSGLTQSPGTLSLSPGETAIISCRTSQYGSLAWYQQRPGQAPRLVIYSGSTRAAGIPDRFSGSRWGPDYNLTISNLESGDFGVYYCQQYEFFGQGTKVQVDIKGGGGSGGSGSGGGGSASGSGQVQLVQSGGQMKKPGESMRISCRASGYEFIDCTLNWIRLAPGKRPEWMGWLKPRGGAVNYARPLQGRVTMTRDVYSDTAFLELRSLTVDDTAVYFCTRGKNCDYNWDFEHWGRGTPVIVSSGGSSGQMQLQESGPGLVKPSETLSLTCSVSGASISDSYWSWIRRSPGKGLEWIGYVHKSGDTNYSPSLKSRVNLSLDTSKNQVSLSLVAATAADSGKYYCARTLHGRRIYGIVAFNEWFTYFYMDVWGNGTQVTVSSASGGSGDKTHTCPPCPAPELLGGPSVFLFPPKPKDTLMISRTPEVTCVVVDVSHEDPEVKFNWYVDGVEVHNAKTKPREEQYNSTYRVVSVLTVLHQDWLNGKEYKCKVSNKALPAPIEKTISKAKGQPREPQVCTLPPSRDELTKNQVSLSCAVKGFYPSDIAVEWESNGQPENNYKTTPPVLDSDGSFFLVSKLTVDKSRWQQGNVFSCSVMHEALHNHYTQKSLSLSPG

SEQ ID NO: 189 - protein, 720 aa, synthetic construct
  REGION 1..720: note = _
LTQSPGTLSLSPGETAIISCRTSQYGSLAWYQQRPGQAPRLVIYSGSTRAAGIPDRFSGSRWGPDYNLTISNLESGDFGVYYCQQYEFFGQGTKVQVDIKGGSSGSDISVAPGETARISCGEKSLGSRAVQWYQHRAGQAPSLIIYNNQDRPSGIPERFSGSPDSPFGTTATLTITSVEAGDEADYYCHIWDSRVPTKWVFGGGTTLTVLGGGGSGGSGSGGGGSASGSGQMQLQESGPGLVKPSETLSLTCSVSGASISDSYWSWIRRSPGKGLEWIGYVHKSGDTNYSPSLKSRVNLSLDTSKNQVSLSLVAATAADSGKYYCARTLHGRRIYGIVAFNEWFTYFYMDVWGNGTQVTVSSGGSSGQVQLVQSGGQMKKPGESMRISCRASGYEFIDCTLNWIRLAPGKRPEWMGWLKPRGGAVNYARPLQGRVTMTRDVYSDTAFLELRSLTVDDTAVYFCTRGKNCDYNWDFEHWGRGTPVIVSSASGGSGDKTHTCPPCPAPELLGGPSVFLFPPKPKDTLMISRTPEVTCVVVDVSHEDPEVKFNWYVDGVEVHNAKTKPREEQYNSTYRVVSVLTVLHQDWLNGKEYKCKVSNKALPAPIEKTISKAKGQPREPQVCTLPPSRDELTKNQVSLSCAVKGFYPSDIAVEWESNGQPENNYKTTPPVLDSDGSFFLVSKLTVDKSRWQQGNVFSCSVMHEALHNHYTQKSLSLSPG

SEQ ID NO: 190 - protein, 748 aa, synthetic construct
  REGION 1..748: note = _
SELTQDPAVSVALKQTVTITCRGDSLRSHYASWYQKKPGQAPVLLFYGKNNRPSGIPDRFSGSASGNRASLTITGAQAEDEADYYCSSRDKSGSRLSVFGGGTKLTVLGGSSGQSALTQPASVSGSPGQTITISCNGTSSDVGGFDSVSWYQQSPGKAPKVMVFDVSHRPSGISNRFSGSKSGNTASLTISGLHIEDEGDYFCSSLTDRSHRIFGGGTKVTVLGGGGSGGSGSGGGGSASGSGQEQLVESGGGVVQPGGSLRLSCLASGFTFHKYGMHWVRQAPGKGLEWVALISDDGMRKYHSDSMWGRVTISRDNSKNTLYLQFSSLKVEDTAMFFCAREAGGPIWHDDVKYYDFNDGYYNYHYMDVWGKGTTVTVSSGGSSGEVRLVESGGGLVKPGGSLRLSCSASGFDFDNAWMTWVRQPPGKGLEWVGRITGPGEGWSVDYAESVKGRFTISRDNTKNTLYLEMNNVRTEDTGYYFCARTGKYYDFWSGYPPGEEYFQDWGQGTLVIVSSASGGSGDKTHTCPPCPAPELLGGPSVFLFPPKPKDTLMISRTPEVTCVVVDVSHEDPEVKFNWYVDGVEVHNAKTKPREEQYNSTYRVVSVLTVLHQDWLNGKEYKCKVSNKALPAPIEKTISKAKGQPREPQVYTLPPCRDELTKNQVSLWCLVKGFYPSDIAVEWESNGQPENNYKTTPPVLDSDGSFFLYSKLTVDKSRWQQGNVFSCSVMHEALHNHYTQKSLSLSPG

SEQ ID NO: 191 - protein, 748 aa, synthetic construct
  REGION 1..748: note = _
QSALTQPASVSGSPGQTITISCNGTSSDVGGFDSVSWYQQSPGKAPKVMVFDVSHRPSGISNRFSGSKSGNTASLTISGLHIEDEGDYFCSSLTDRSHRIFGGGTKVTVLGGSSGSELTQDPAVSVALKQTVTITCRGDSLRSHYASWYQKKPGQAPVLLFYGKNNRPSGIPDRFSGSASGNRASLTITGAQAEDEADYYCSSRDKSGSRLSVFGGGTKLTVLGGGGSGGSGSGGGGSASGSGEVRLVESGGGLVKPGGSLRLSCSASGFDFDNAWMTWVRQPPGKGLEWVGRITGPGEGWSVDYAESVKGRFTISRDNTKNTLYLEMNNVRTEDTGYYFCARTGKYYDFWSGYPPGEEYFQDWGQGTLVIVSSGGSSGQEQLVESGGGVVQPGGSLRLSCLASGFTFHKYGMHWVRQAPGKGLEWVALISDDGMRKYHSDSMWGRVTISRDNSKNTLYLQFSSLKVEDTAMFFCAREAGGPIWHDDVKYYDFNDGYYNYHYMDVWGKGTTVTVSSASGGSGDKTHTCPPCPAPELLGGPSVFLFPPKPKDTLMISRTPEVTCVVVDVSHEDPEVKFNWYVDGVEVHNAKTKPREEQYNSTYRVVSVLTVLHQDWLNGKEYKCKVSNKALPAPIEKTISKAKGQPREPQVYTLPPCRDELTKNQVSLWCLVKGFYPSDIAVEWESNGQPENNYKTTPPVLDSDGSFFLYSKLTVDKSRWQQGNVFSCSVMHEALHNHYTQKSLSLSPG

SEQ ID NO: 192 - protein, 738 aa, synthetic construct
  REGION 1..738: note = _
SDISVAPGETARISCGEKSLGSRAVQWYQHRAGQAPSLIIYNNQDRPSGIPERFSGSPDSPFGTTATLTITSVEAGDEADYYCHIWDSRVPTKWVFGGGTTLTVLGGSSGSELTQDPAVSVALKQTVTITCRGDSLRSHYASWYQKKPGQAPVLLFYGKNNRPSGIPDRFSGSASGNRASLTITGAQAEDEADYYCSSRDKSGSRLSVFGGGTKLTVLGGGGSGGSGSGGGGSASGSGEVRLVESGGGLVKPGGSLRLSCSASGFDFDNAWMTWVRQPPGKGLEWVGRITGPGEGWSVDYAESVKGRFTISRDNTKNTLYLEMNNVRTEDTGYYFCARTGKYYDFWSGYPPGEEYFQDWGQGTLVIVSSGGSSGQMQLQESGPGLVKPSETLSLTCSVSGASISDSYWSWIRRSPGKGLEWIGYVHKSGDTNYSPSLKSRVNLSLDTSKNQVSLSLVAATAADSGKYYCARTLHGRRIYGIVAFNEWFTYFYMDVWGNGTQVTVSSASGGSGDKTHTCPPCPAPELLGGPSVFLFPPKPKDTLMISRTPEVTCVVVDVSHEDPEVKFNWYVDGVEVHNAKTKPREEQYNSTYRVVSVLTVLHQDWLNGKEYKCKVSNKALPAPIEKTISKAKGQPREPQVCTLPPSRDELTKNQVSLSCAVKGFYPSDIAVEWESNGQPENNYKTTPPVLDSDGSFFLVSKLTVDKSRWQQGNVFSCSVMHEALHNHYTQKSLSLSPG

SEQ ID NO: 193 - protein, 738 aa, synthetic construct
  REGION 1..738: note = _
SELTQDPAVSVALKQTVTITCRGDSLRSHYASWYQKKPGQAPVLLFYGKNNRPSGIPDRFSGSASGNRASLTITGAQAEDEADYYCSSRDKSGSRLSVFGGGTKLTVLGGSSGSDISVAPGETARISCGEKSLGSRAVQWYQHRAGQAPSLIIYNNQDRPSGIPERFSGSPDSPFGTTATLTITSVEAGDEADYYCHIWDSRVPTKWVFGGGTTLTVLGGGGSGGSGSGGGGSASGSGQMQLQESGPGLVKPSETLSLTCSVSGASISDSYWSWIRRSPGKGLEWIGYVHKSGDTNYSPSLKSRVNLSLDTSKNQVSLSLVAATAADSGKYYCARTLHGRRIYGIVAFNEWFTYFYMDVWGNGTQVTVSSGGSSGEVRLVESGGGLVKPGGSLRLSCSASGFDFDNAWMTWVRQPPGKGLEWVGRITGPGEGWSVDYAESVKGRFTISRDNTKNTLYLEMNNVRTEDTGYYFCARTGKYYDFWSGYPPGEEYFQDWGQGTLVIVSSASGGSGDKTHTCPPCPAPELLGGPSVFLFPPKPKDTLMISRTPEVTCVVVDVSHEDPEVKFNWYVDGVEVHNAKTKPREEQYNSTYRVVSVLTVLHQDWLNGKEYKCKVSNKALPAPIEKTISKAKGQPREPQVCTLPPSRDELTKNQVSLSCAVKGFYPSDIAVEWESNGQPENNYKTTPPVLDSDGSFFLVSKLTVDKSRWQQGNVFSCSVMHEALHNHYTQKSLSLSPG

SEQ ID NO: 194 - protein, 730 aa, synthetic construct
  REGION 1..730: note = _
LTQSPGTLSLSPGETAIISCRTSQYGSLAWYQQRPGQAPRLVIYSGSTRAAGIPDRFSGSRWGPDYNLTISNLESGDFGVYYCQQYEFFGQGTKVQVDIKGGSSGQSALTQPASVSGSPGQTITISCNGTSSDVGGFDSVSWYQQSPGKAPKVMVFDVSHRPSGISNRFSGSKSGNTASLTISGLHIEDEGDYFCSSLTDRSHRIFGGGTKVTVLGGGGSGGSGSGGGGSASGSGQEQLVESGGGVVQPGGSLRLSCLASGFTFHKYGMHWVRQAPGKGLEWVALISDDGMRKYHSDSMWGRVTISRDNSKNTLYLQFSSLKVEDTAMFFCAREAGGPIWHDDVKYYDFNDGYYNYHYMDVWGKGTTVTVSSGGSSGQVQLVQSGGQMKKPGESMRISCRASGYEFIDCTLNWIRLAPGKRPEWMGWLKPRGGAVNYARPLQGRVTMTRDVYSDTAFLELRSLTVDDTAVYFCTRGKNCDYNWDFEHWGRGTPVIVSSASGGSGDKTHTCPPCPAPELLGGPSVFLFPPKPKDTLMISRTPEVTCVVVDVSHEDPEVKFNWYVDGVEVHNAKTKPREEQYNSTYRVVSVLTVLHQDWLNGKEYKCKVSNKALPAPIEKTISKAKGQPREPQVYTLPPCRDELTKNQVSLWCLVKGFYPSDIAVEWESNGQPENNYKTTPPVLDSDGSFFLYSKLTVDKSRWQQGNVFSCSVMHEALHNHYTQKSLSLSPG

SEQ ID NO: 195 - protein, 730 aa, synthetic construct
  REGION 1..730: note = _
QSALTQPASVSGSPGQTITISCNGTSSDVGGFDSVSWYQQSPGKAPKVMVFDVSHRPSGISNRFSGSKSGNTASLTISGLHIEDEGDYFCSSLTDRSHRIFGGGTKVTVLGGSSGLTQSPGTLSLSPGETAIISCRTSQYGSLAWYQQRPGQAPRLVIYSGSTRAAGIPDRFSGSRWGPDYNLTISNLESGDFGVYYCQQYEFFGQGTKVQVDIKGGGGSGGSGSGGGGSASGSGQVQLVQSGGQMKKPGESMRISCRASGYEFIDCTLNWIRLAPGKRPEWMGWLKPRGGAVNYARPLQGRVTMTRDVYSDTAFLELRSLTVDDTAVYFCTRGKNCDYNWDFEHWGRGTPVIVSSGGSSGQEQLVESGGGVVQPGGSLRLSCLASGFTFHKYGMHWVRQAPGKGLEWVALISDDGMRKYHSDSMWGRVTISRDNSKNTLYLQFSSLKVEDTAMFFCAREAGGPIWHDDVKYYDFNDGYYNYHYMDVWGKGTTVTVSSASGGSGDKTHTCPPCPAPELLGGPSVFLFPPKPKDTLMISRTPEVTCVVVDVSHEDPEVKFNWYVDGVEVHNAKTKPREEQYNSTYRVVSVLTVLHQDWLNGKEYKCKVSNKALPAPIEKTISKAKGQPREPQVYTLPPCRDELTKNQVSLWCLVKGFYPSDIAVEWESNGQPENNYKTTPPVLDSDGSFFLYSKLTVDKSRWQQGNVFSCSVMHEALHNHYTQKSLSLSPG

SEQ ID NO: 196 - protein, 746 aa, synthetic construct
  REGION 1..746: note = _
SDISVAPGETARISCGEKSLGSRAVQWYQHRAGQAPSLIIYNNQDRPSGIPERFSGSPDSPFGTTATLTITSVEAGDEADYYCHIWDSRVPTKWVFGGGTTLTVLGGSSGQSALTQPASVSGSPGQTITISCNGTSSDVGGFDSVSWYQQSPGKAPKVMVFDVSHRPSGISNRFSGSKSGNTASLTISGLHIEDEGDYFCSSLTDRSHRIFGGGTKVTVLGGGGSGGSGSGGGGSASGSGQEQLVESGGGVVQPGGSLRLSCLASGFTFHKYGMHWVRQAPGKGLEWVALISDDGMRKYHSDSMWGRVTISRDNSKNTLYLQFSSLKVEDTAMFFCAREAGGPIWHDDVKYYDFNDGYYNYHYMDVWGKGTTVTVSSGGSSGQMQLQESGPGLVKPSETLSLTCSVSGASISDSYWSWIRRSPGKGLEWIGYVHKSGDTNYSPSLKSRVNLSLDTSKNQVSLSLVAATAADSGKYYCARTLHGRRIYGIVAFNEWFTYFYMDVWGNGTQVTVSSASGGSGDKTHTCPPCPAPELLGGPSVFLFPPKPKDTLMISRTPEVTCVVVDVSHEDPEVKFNWYVDGVEVHNAKTKPREEQYNSTYRVVSVLTVLHQDWLNGKEYKCKVSNKALPAPIEKTISKAKGQPREPQVCTLPPSRDELTKNQVSLSCAVKGFYPSDIAVEWESNGQPENNYKTTPPVLDSDGSFFLVSKLTVDKSRWQQGNVFSCSVMHEALHNHYTQKSLSLSPG

SEQ ID NO: 197 - protein, 746 aa, synthetic construct
  REGION 1..746: note = _
QSALTQPASVSGSPGQTITISCNGTSSDVGGFDSVSWYQQSPGKAPKVMVFDVSHRPSGISNRFSGSKSGNTASLTISGLHIEDEGDYFCSSLTDRSHRIFGGGTKVTVLGGSSGSDISVAPGETARISCGEKSLGSRAVQWYQHRAGQAPSLIIYNNQDRPSGIPERFSGSPDSPFGTTATLTITSVEAGDEADYYCHIWDSRVPTKWVFGGGTTLTVLGGGGSGGSGSGGGGSASGSGQMQLQESGPGLVKPSETLSLTCSVSGASISDSYWSWIRRSPGKGLEWIGYVHKSGDTNYSPSLKSRVNLSLDTSKNQVSLSLVAATAADSGKYYCARTLHGRRIYGIVAFNEWFTYFYMDVWGNGTQVTVSSGGSSGQEQLVESGGGVVQPGGSLRLSCLASGFTFHKYGMHWVRQAPGKGLEWVALISDDGMRKYHSDSMWGRVTISRDNSKNTLYLQFSSLKVEDTAMFFCAREAGGPIWHDDVKYYDFNDGYYNYHYMDVWGKGTTVTVSSASGGSGDKTHTCPPCPAPELLGGPSVFLFPPKPKDTLMISRTPEVTCVVVDVSHEDPEVKFNWYVDGVEVHNAKTKPREEQYNSTYRVVSVLTVLHQDWLNGKEYKCKVSNKALPAPIEKTISKAKGQPREPQVCTLPPSRDELTKNQVSLSCAVKGFYPSDIAVEWESNGQPENNYKTTPPVLDSDGSFFLVSKLTVDKSRWQQGNVFSCSVMHEALHNHYTQKSLSLSPG

SEQ ID NO: 198 - protein, 722 aa, synthetic construct
  REGION 1..722: note = _
LTQSPGTLSLSPGETAIISCRTSQYGSLAWYQQRPGQAPRLVIYSGSTRAAGIPDRFSGSRWGPDYNLTISNLESGDFGVYYCQQYEFFGQGTKVQVDIKGGSSGSELTQDPAVSVALKQTVTITCRGDSLRSHYASWYQKKPGQAPVLLFYGKNNRPSGIPDRFSGSASGNRASLTITGAQAEDEADYYCSSRDKSGSRLSVFGGGTKLTVLGGGGSGGSGSGGGGSASGSGEVRLVESGGGLVKPGGSLRLSCSASGFDFDNAWMTWVRQPPGKGLEWVGRITGPGEGWSVDYAESVKGRFTISRDNTKNTLYLEMNNVRTEDTGYYFCARTGKYYDFWSGYPPGEEYFQDWGQGTLVIVSSGGSSGQVQLVQSGGQMKKPGESMRISCRASGYEFIDCTLNWIRLAPGKRPEWMGWLKPRGGAVNYARPLQGRVTMTRDVYSDTAFLELRSLTVDDTAVYFCTRGKNCDYNWDFEHWGRGTPVIVSSASGGSGDKTHTCPPCPAPELLGGPSVFLFPPKPKDTLMISRTPEVTCVVVDVSHEDPEVKFNWYVDGVEVHNAKTKPREEQYNSTYRVVSVLTVLHQDWLNGKEYKCKVSNKALPAPIEKTISKAKGQPREPQVYTLPPCRDELTKNQVSLWCLVKGFYPSDIAVEWESNGQPENNYKTTPPVLDSDGSFFLYSKLTVDKSRWQQGNVFSCSVMHEALHNHYTQKSLSLSPG

SEQ ID NO: 199 - protein, 722 aa, synthetic construct
  REGION 1..722: note = _
SELTQDPAVSVALKQTVTITCRGDSLRSHYASWYQKKPGQAPVLLFYGKNNRPSGIPDRFSGSASGNRASLTITGAQAEDEADYYCSSRDKSGSRLSVFGGGTKLTVLGGSSGLTQSPGTLSLSPGETAIISCRTSQYGSLAWYQQRPGQAPRLVIYSGSTRAAGIPDRFSGSRWGPDYNLTISNLESGDFGVYYCQQYEFFGQGTKVQVDIKGGGGSGGSGSGGGGSASGSGQVQLVQSGGQMKKPGESMRISCRASGYEFIDCTLNWIRLAPGKRPEWMGWLKPRGGAVNYARPLQGRVTMTRDVYSDTAFLELRSLTVDDTAVYFCTRGKNCDYNWDFEHWGRGTPVIVSSGGSSGEVRLVESGGGLVKPGGSLRLSCSASGFDFDNAWMTWVRQPPGKGLEWVGRITGPGEGWSVDYAESVKGRFTISRDNTKNTLYLEMNNVRTEDTGYYFCARTGKYYDFWSGYPPGEEYFQDWGQGTLVIVSSASGGSGDKTHTCPPCPAPELLGGPSVFLFPPKPKDTLMISRTPEVTCVVVDVSHEDPEVKFNWYVDGVEVHNAKTKPREEQYNSTYRVVSVLTVLHQDWLNGKEYKCKVSNKALPAPIEKTISKAKGQPREPQVYTLPPCRDELTKNQVSLWCLVKGFYPSDIAVEWESNGQPENNYKTTPPVLDSDGSFFLYSKLTVDKSRWQQGNVFSCSVMHEALHNHYTQKSLSLSPG

SEQ ID NO: 200 - protein, 578 aa, synthetic construct
  REGION 1..578: note = _
QVQLVQSGAEVVKPGASVKVSCKASGYTFTSYAMHWVKEAPGQRLEWIGYIYPGQGGTNYNQKFQGRATLTADTSASTAYMELSSLRSEDTAVYFCARTGGLRRAYFTYWGQGTLVTVSSGGSGSSGQVQLVESGGGVVQPGRSLRLSCAASGFTFTKAWMHWVRQAPGKQLEWVAQIKDKSNSYATYYADSVKGRFTISRDDSKNTLYLQMNSLRAEDTAVYYCRGVYYALSPFDYWGQGTLVTVSSASTKGPSVFPLAPSSKSTSGGTAALGCLVKDYFPEPVTVSWNSGALTSGVHTFPAVLQSSGLYSLSSVVTVPSSSLGTQTYICNVNHKPSNTKVDKKVEPKSCDKTHTCPPCPAPELLGGPSVFLFPPKPKDTLMISRTPEVTCVVVDVSHEDPEVKFNWYVDGVEVHNAKTKPREEQYNSTYRVVSVLTVLHQDWLNGKEYKCKVSNKALPAPIEKTISKAKGQPREPQVYTLPPSRDELTKNQVSLTCLVKGFYPSDIAVEWESNGQPENNYKTTPPVLDSDGSFFLYSKLTVDKSRWQQGNVFSCSVMHEALHNHYTQKSLSLSPGK

SEQ ID NO: 201 - protein, 337 aa, synthetic construct
  REGION 1..337: note = _
DIVLTQSPATLSLSPGERATISCRASQSVSSYGQGFMHWYQQKPGQPPRLLIYGASSRATGIPARFSGSGSGTDFTLTISPLEPEDFAVYYCQQNKEDPWTFGGGTKLEIKGGSGSSGDIVMTQTPLSLSVTPGQPASISCKSSQSLVHNNANTYLSWYLQKPGQSPQSLIYKVSNRFSGVPDRFSGSGSGTDFTLKISRVEAEDVGVYYCGQGTQYPFTFGSGTKVEIKRTVAAPSVFIFPPSDEQLKSGTASVVCLLNNFYPREAKVQWKVDNALQSGNSQESVTEQDSKDSTYSLSSTLTLSKADYEKHKVYACEVTHQGLSSPVTKSFNRGEC

SEQ ID NO: 202 - protein, 577 aa, synthetic construct
  REGION 1..577: note = _
QVQLVQSGAEVVKPGASVKVSCKASGYTFTSYAMHWVKEAPGQRLEWIGYIYPGQGGTNYNQKFQGRATLTADTSASTAYMELSSLRSEDTAVYFCARTGGLRRAYFTYWGQGTLVTVSSGPAALVQVQLVESGGGVVQPGRSLRLSCAASGFTFTKAWMHWVRQAPGKQLEWVAQIKDKSNSYATYYADSVKGRFTISRDDSKNTLYLQMNSLRAEDTAVYYCRGVYYALSPFDYWGQGTLVTVSSASTKGPSVFPLAPSSKSTSGGTAALGCLVKDYFPEPVTVSWNSGALTSGVHTFPAVLQSSGLYSLSSVVTVPSSSLGTQTYICNVNHKPSNTKVDKKVEPKSCDKTHTCPPCPAPELLGGPSVFLFPPKPKDTLMISRTPEVTCVVVDVSHEDPEVKFNWYVDGVEVHNAKTKPREEQYNSTYRVVSVLTVLHQDWLNGKEYKCKVSNKALPAPIEKTISKAKGQPREPQVYTLPPSRDELTKNQVSLTCLVKGFYPSDIAVEWESNGQPENNYKTTPPVLDSDGSFFLYSKLTVDKSRWQQGNVFSCSVMHEALHNHYTQKSLSLSPGK

SEQ ID NO: 203 - protein, 336 aa, synthetic construct
  REGION 1..336: note = _
DIVLTQSPATLSLSPGERATISCRASQSVSSYGQGFMHWYQQKPGQPPRLLIYGASSRATGIPARFSGSGSGTDFTLTISPLEPEDFAVYYCQQNKEDPWTFGGGTKLEIKGPAALVDIVMTQTPLSLSVTPGQPASISCKSSQSLVHNNANTYLSWYLQKPGQSPQSLIYKVSNRFSGVPDRFSGSGSGTDFTLKISRVEAEDVGVYYCGQGTQYPFTFGSGTKVEIKRTVAAPSVFIFPPSDEQLKSGTASVVCLLNNFYPREAKVQWKVDNALQSGNSQESVTEQDSKDSTYSLSSTLTLSKADYEKHKVYACEVTHQGLSSPVTKSFNRGEC

SEQ ID NO: 204 - protein, 578 aa, synthetic construct
  REGION 1..578: note = _
QVQLVQSGAEVVKPGASVKVSCKASGYTFTSYAMHWVKEAPGQRLEWIGYIYPGQGGTNYNQKFQGRATLTADTSASTAYMELSSLRSEDTAVYFCARTGGLRRAYFTYWGQGTLVTVSSGPLGLTGQVQLVESGGGVVQPGRSLRLSCAASGFTFTKAWMHWVRQAPGKQLEWVAQIKDKSNSYATYYADSVKGRFTISRDDSKNTLYLQMNSLRAEDTAVYYCRGVYYALSPFDYWGQGTLVTVSSASTKGPSVFPLAPSSKSTSGGTAALGCLVKDYFPEPVTVSWNSGALTSGVHTFPAVLQSSGLYSLSSVVTVPSSSLGTQTYICNVNHKPSNTKVDKKVEPKSCDKTHTCPPCPAPELLGGPSVFLFPPKPKDTLMISRTPEVTCVVVDVSHEDPEVKFNWYVDGVEVHNAKTKPREEQYNSTYRVVSVLTVLHQDWLNGKEYKCKVSNKALPAPIEKTISKAKGQPREPQVYTLPPSRDELTKNQVSLTCLVKGFYPSDIAVEWESNGQPENNYKTTPPVLDSDGSFFLYSKLTVDKSRWQQGNVFSCSVMHEALHNHYTQKSLSLSPGK

SEQ ID NO: 205 - protein, 337 aa, synthetic construct
  REGION 1..337: note = _
DIVLTQSPATLSLSPGERATISCRASQSVSSYGQGFMHWYQQKPGQPPRLLIYGASSRATGIPARFSGSGSGTDFTLTISPLEPEDFAVYYCQQNKEDPWTFGGGTKLEIKGPLGLTGDIVMTQTPLSLSVTPGQPASISCKSSQSLVHNNANTYLSWYLQKPGQSPQSLIYKVSNRFSGVPDRFSGSGSGTDFTLKISRVEAEDVGVYYCGQGTQYPFTFGSGTKVEIKRTVAAPSVFIFPPSDEQLKSGTASVVCLLNNFYPREAKVQWKVDNALQSGNSQESVTEQDSKDSTYSLSSTLTLSKADYEKHKVYACEVTHQGLSSPVTKSFNRGEC

SEQ ID NO: 206 - protein, 578 aa, synthetic construct
  REGION 1..578: note = _
QVQLVQSGAEVVKPGASVKVSCKASGYTFTSYAMHWVKEAPGQRLEWIGYIYPGQGGTNYNQKFQGRATLTADTSASTAYMELSSLRSEDTAVYFCARTGGLRRAYFTYWGQGTLVTVSSGPSGLVGQVQLVESGGGVVQPGRSLRLSCAASGFTFTKAWMHWVRQAPGKQLEWVAQIKDKSNSYATYYADSVKGRFTISRDDSKNTLYLQMNSLRAEDTAVYYCRGVYYALSPFDYWGQGTLVTVSSASTKGPSVFPLAPSSKSTSGGTAALGCLVKDYFPEPVTVSWNSGALTSGVHTFPAVLQSSGLYSLSSVVTVPSSSLGTQTYICNVNHKPSNTKVDKKVEPKSCDKTHTCPPCPAPELLGGPSVFLFPPKPKDTLMISRTPEVTCVVVDVSHEDPEVKFNWYVDGVEVHNAKTKPREEQYNSTYRVVSVLTVLHQDWLNGKEYKCKVSNKALPAPIEKTISKAKGQPREPQVYTLPPSRDELTKNQVSLTCLVKGFYPSDIAVEWESNGQPENNYKTTPPVLDSDGSFFLYSKLTVDKSRWQQGNVFSCSVMHEALHNHYTQKSLSLSPGK

SEQ ID NO: 207 - protein, 337 aa, synthetic construct
  REGION 1..337: note = _
DIVLTQSPATLSLSPGERATISCRASQSVSSYGQGFMHWYQQKPGQPPRLLIYGASSRATGIPARFSGSGSGTDFTLTISPLEPEDFAVYYCQQNKEDPWTFGGGTKLEIKGPSGLVGDIVMTQTPLSLSVTPGQPASISCKSSQSLVHNNANTYLSWYLQKPGQSPQSLIYKVSNRFSGVPDRFSGSGSGTDFTLKISRVEAEDVGVYYCGQGTQYPFTFGSGTKVEIKRTVAAPSVFIFPPSDEQLKSGTASVVCLLNNFYPREAKVQWKVDNALQSGNSQESVTEQDSKDSTYSLSSTLTLSKADYEKHKVYACEVTHQGLSSPVTKSFNRGEC

SEQ ID NO: 208 - protein, 577 aa, synthetic construct
  REGION 1..577: note = _
QVQLVQSGAEVVKPGASVKVSCKASGYTFTSYAMHWVKEAPGQRLEWIGYIYPGQGGTNYNQKFQGRATLTADTSASTAYMELSSLRSEDTAVYFCARTGGLRRAYFTYWGQGTLVTVSSGSGRKGQVQLVESGGGVVQPGRSLRLSCAASGFTFTKAWMHWVRQAPGKQLEWVAQIKDKSNSYATYYADSVKGRFTISRDDSKNTLYLQMNSLRAEDTAVYYCRGVYYALSPFDYWGQGTLVTVSSASTKGPSVFPLAPSSKSTSGGTAALGCLVKDYFPEPVTVSWNSGALTSGVHTFPAVLQSSGLYSLSSVVTVPSSSLGTQTYICNVNHKPSNTKVDKKVEPKSCDKTHTCPPCPAPELLGGPSVFLFPPKPKDTLMISRTPEVTCVVVDVSHEDPEVKFNWYVDGVEVHNAKTKPREEQYNSTYRVVSVLTVLHQDWLNGKEYKCKVSNKALPAPIEKTISKAKGQPREPQVYTLPPSRDELTKNQVSLTCLVKGFYPSDIAVEWESNGQPENNYKTTPPVLDSDGSFFLYSKLTVDKSRWQQGNVFSCSVMHEALHNHYTQKSLSLSPGK

SEQ ID NO: 209 - protein, 336 aa, synthetic construct
  REGION 1..336: note = _
DIVLTQSPATLSLSPGERATISCRASQSVSSYGQGFMHWYQQKPGQPPRLLIYGASSRATGIPARFSGSGSGTDFTLTISPLEPEDFAVYYCQQNKEDPWTFGGGTKLEIKGSGRKGDIVMTQTPLSLSVTPGQPASISCKSSQSLVHNNANTYLSWYLQKPGQSPQSLIYKVSNRFSGVPDRFSGSGSGTDFTLKISRVEAEDVGVYYCGQGTQYPFTFGSGTKVEIKRTVAAPSVFIFPPSDEQLKSGTASVVCLLNNFYPREAKVQWKVDNALQSGNSQESVTEQDSKDSTYSLSSTLTLSKADYEKHKVYACEVTHQGLSSPVTKSFNRGEC

SEQ ID NO: 210 - protein, 579 aa, synthetic construct
  REGION 1..579: note = _
QVQLVQSGAEVVKPGASVKVSCKASGYTFTSYAMHWVKEAPGQRLEWIGYIYPGQGGTNYNQKFQGRATLTADTSASTAYMELSSLRSEDTAVYFCARTGGLRRAYFTYWGQGTLVTVSSASTRKAGGQVQLVESGGGVVQPGRSLRLSCAASGFTFTKAWMHWVRQAPGKQLEWVAQIKDKSNSYATYYADSVKGRFTISRDDSKNTLYLQMNSLRAEDTAVYYCRGVYYALSPFDYWGQGTLVTVSSASTKGPSVFPLAPSSKSTSGGTAALGCLVKDYFPEPVTVSWNSGALTSGVHTFPAVLQSSGLYSLSSVVTVPSSSLGTQTYICNVNHKPSNTKVDKKVEPKSCDKTHTCPPCPAPELLGGPSVFLFPPKPKDTLMISRTPEVTCVVVDVSHEDPEVKFNWYVDGVEVHNAKTKPREEQYNSTYRVVSVLTVLHQDWLNGKEYKCKVSNKALPAPIEKTISKAKGQPREPQVYTLPPSRDELTKNQVSLTCLVKGFYPSDIAVEWESNGQPENNYKTTPPVLDSDGSFFLYSKLTVDKSRWQQGNVFSCSVMHEALHNHYTQKSLSLSPGK

SEQ ID NO: 211 - protein, 338 aa, synthetic construct
  REGION 1..338: note = _
DIVLTQSPATLSLSPGERATISCRASQSVSSYGQGFMHWYQQKPGQPPRLLIYGASSRATGIPARFSGSGSGTDFTLTISPLEPEDFAVYYCQQNKEDPWTFGGGTKLEIKASTRKAGGDIVMTQTPLSLSVTPGQPASISCKSSQSLVHNNANTYLSWYLQKPGQSPQSLIYKVSNRFSGVPDRFSGSGSGTDFTLKISRVEAEDVGVYYCGQGTQYPFTFGSGTKVEIKRTVAAPSVFIFPPSDEQLKSGTASVVCLLNNFYPREAKVQWKVDNALQSGNSQESVTEQDSKDSTYSLSSTLTLSKADYEKHKVYACEVTHQGLSSPVTKSFNRGEC

SEQ ID NO: 212 - protein, 573 aa, synthetic construct
  REGION 1..573: note = _
QVQLVQSGAEVKKPGASVKVSCKASGYTFTSYYIHWVRQAPGQGLEWIGSIYPGNVNTNYNEKFKDRATLTVDTSISTAYMELSRLRSDDTAVYFCTRSHYGLDWNFDVWGQGTTVTVSSGGSGSDIKLQQSGAELARPGASVKMSCKTSGYTFTRYTMHWVKQRPGQGLEWIGYINPSRGYTNYNQKFKDKATLTTDKSSSTAYMQLSSLTSEDSAVYYCARYYDDHYSLDYWGQGTTLTVSSASTKGPSVFPLAPSSKSTSGGTAALGCLVKDYFPEPVTVSWNSGALTSGVHTFPAVLQSSGLYSLSSVVTVPSSSLGTQTYICNVNHKPSNTKVDKKVEPKSCDKTHTCPPCPAPEAAGGPSVFLFPPKPKDTLMISRTPEVTCVVVDVSHEDPEVKFNWYVDGVEVHNAKTKPREEQYNSTYRVVSVLTVLHQDWLNGKEYKCKVSNKALAAPIEKTISKAKGQPREPQVCTLPPSRDELTKNQVSLSCAVKGFYPSDIAVEWESNGQPENNYKTTPPVLDSDGSFFLVSKLTVDKSRWQQGNVFSCSVMHEALHNHYTQKSLSLSPG

SEQ ID NO: 213 - protein, 325 aa, synthetic construct
  REGION 1..325: note = _
DIQMTQSPSSLSASVGDRVTITCHASQNIYVWLNWYQQKPGKAPKLLIYKASNLHTGVPSRFSGSGSGTDFTLTISSLQPEDFATYYCQQGQTYPYTFGGGTKVEIKGGSGSDIQLTQSPAIMSASPGEKVTMTCRASSSVSYMNWYQQKSGTSPKRWIYDTSKVASGVPYRFSGSGSGTSYSLTISSMEAEDAATYYCQQWSSNPLTFGAGTKLELKRTVAAPSVFIFPPSDEQLKSGTASVVCLLNNFYPREAKVQWKVDNALQSGNSQESVTEQDSKDSTYSLSSTLTLSKADYEKHKVYACEVTHQGLSSPVTKSFNRGEC

SEQ ID NO: 214 - protein, 575 aa, synthetic construct
  REGION 1..575: note = _
QVQLVQSGAEVKKPGASVKVSCKASGYTFTSYYIHWVRQAPGQGLEWIGSIYPGNVNTNYNEKFKDRATLTVDTSISTAYMELSRLRSDDTAVYFCTRSHYGLDWNFDVWGQGTTVTVSSGPSGLVGDIKLQQSGAELARPGASVKMSCKTSGYTFTRYTMHWVKQRPGQGLEWIGYINPSRGYTNYNQKFKDKATLTTDKSSSTAYMQLSSLTSEDSAVYYCARYYDDHYSLDYWGQGTTLTVSSASTKGPSVFPLAPSSKSTSGGTAALGCLVKDYFPEPVTVSWNSGALTSGVHTFPAVLQSSGLYSLSSVVTVPSSSLGTQTYICNVNHKPSNTKVDKKVEPKSCDKTHTCPPCPAPEAAGGPSVFLFPPKPKDTLMISRTPEVTCVVVDVSHEDPEVKFNWYVDGVEVHNAKTKPREEQYNSTYRVVSVLTVLHQDWLNGKEYKCKVSNKALAAPIEKTISKAKGQPREPQVCTLPPSRDELTKNQVSLSCAVKGFYPSDIAVEWESNGQPENNYKTTPPVLDSDGSFFLVSKLTVDKSRWQQGNVFSCSVMHEALHNHYTQKSLSLSPG

SEQ ID NO: 215 - protein, 327 aa, synthetic construct
  REGION 1..327: note = _
DIQMTQSPSSLSASVGDRVTITCHASQNIYVWLNWYQQKPGKAPKLLIYKASNLHTGVPSRFSGSGSGTDFTLTISSLQPEDFATYYCQQGQTYPYTFGGGTKVEIKGPSGLVGDIQLTQSPAIMSASPGEKVTMTCRASSSVSYMNWYQQKSGTSPKRWIYDTSKVASGVPYRFSGSGSGTSYSLTISSMEAEDAATYYCQQWSSNPLTFGAGTKLELKRTVAAPSVFIFPPSDEQLKSGTASVVCLLNNFYPREAKVQWKVDNALQSGNSQESVTEQDSKDSTYSLSSTLTLSKADYEKHKVYACEVTHQGLSSPVTKSFNRGEC

SEQ ID NO: 216 - protein, 575 aa, synthetic construct
  REGION 1..575: note = _
QVQLVQSGAEVKKPGASVKVSCKASGYTFTSYYIHWVRQAPGQGLEWIGSIYPGNVNTNYNEKFKDRATLTVDTSISTAYMELSRLRSDDTAVYFCTRSHYGLDWNFDVWGQGTTVTVSSGPAGLVGDIKLQQSGAELARPGASVKMSCKTSGYTFTRYTMHWVKQRPGQGLEWIGYINPSRGYTNYNQKFKDKATLTTDKSSSTAYMQLSSLTSEDSAVYYCARYYDDHYSLDYWGQGTTLTVSSASTKGPSVFPLAPSSKSTSGGTAALGCLVKDYFPEPVTVSWNSGALTSGVHTFPAVLQSSGLYSLSSVVTVPSSSLGTQTYICNVNHKPSNTKVDKKVEPKSCDKTHTCPPCPAPEAAGGPSVFLFPPKPKDTLMISRTPEVTCVVVDVSHEDPEVKFNWYVDGVEVHNAKTKPREEQYNSTYRVVSVLTVLHQDWLNGKEYKCKVSNKALAAPIEKTISKAKGQPREPQVCTLPPSRDELTKNQVSLSCAVKGFYPSDIAVEWESNGQPENNYKTTPPVLDSDGSFFLVSKLTVDKSRWQQGNVFSCSVMHEALHNHYTQKSLSLSPG

SEQ ID NO: 217 - protein, 327 aa, synthetic construct
  REGION 1..327: note = _
DIQMTQSPSSLSASVGDRVTITCHASQNIYVWLNWYQQKPGKAPKLLIYKASNLHTGVPSRFSGSGSGTDFTLTISSLQPEDFATYYCQQGQTYPYTFGGGTKVEIKGPAGLVGDIQLTQSPAIMSASPGEKVTMTCRASSSVSYMNWYQQKSGTSPKRWIYDTSKVASGVPYRFSGSGSGTSYSLTISSMEAEDAATYYCQQWSSNPLTFGAGTKLELKRTVAAPSVFIFPPSDEQLKSGTASVVCLLNNFYPREAKVQWKVDNALQSGNSQESVTEQDSKDSTYSLSSTLTLSKADYEKHKVYACEVTHQGLSSPVTKSFNRGEC

SEQ ID NO: 218 - protein, 576 aa, synthetic construct
  REGION 1..576: note = _
QVQLVQSGAEVKKPGASVKVSCKASGYTFTSYYIHWVRQAPGQGLEWIGSIYPGNVNTNYNEKFKDRATLTVDTSISTAYMELSRLRSDDTAVYFCTRSHYGLDWNFDVWGQGTTVTVSSGPAGLVSGDIKLQQSGAELARPGASVKMSCKTSGYTFTRYTMHWVKQRPGQGLEWIGYINPSRGYTNYNQKFKDKATLTTDKSSSTAYMQLSSLTSEDSAVYYCARYYDDHYSLDYWGQGTTLTVSSASTKGPSVFPLAPSSKSTSGGTAALGCLVKDYFPEPVTVSWNSGALTSGVHTFPAVLQSSGLYSLSSVVTVPSSSLGTQTYICNVNHKPSNTKVDKKVEPKSCDKTHTCPPCPAPEAAGGPSVFLFPPKPKDTLMISRTPEVTCVVVDVSHEDPEVKFNWYVDGVEVHNAKTKPREEQYNSTYRVVSVLTVLHQDWLNGKEYKCKVSNKALAAPIEKTISKAKGQPREPQVCTLPPSRDELTKNQVSLSCAVKGFYPSDIAVEWESNGQPENNYKTTPPVLDSDGSFFLVSKLTVDKSRWQQGNVFSCSVMHEALHNHYTQKSLSLSPG

SEQ ID NO: 219 - protein, 328 aa, synthetic construct
  REGION 1..328: note = _
DIQMTQSPSSLSASVGDRVTITCHASQNIYVWLNWYQQKPGKAPKLLIYKASNLHTGVPSRFSGSGSGTDFTLTISSLQPEDFATYYCQQGQTYPYTFGGGTKVEIKGPAGLVSGDIQLTQSPAIMSASPGEKVTMTCRASSSVSYMNWYQQKSGTSPKRWIYDTSKVASGVPYRFSGSGSGTSYSLTISSMEAEDAATYYCQQWSSNPLTFGAGTKLELKRTVAAPSVFIFPPSDEQLKSGTASVVCLLNNFYPREAKVQWKVDNALQSGNSQESVTEQDSKDSTYSLSSTLTLSKADYEKHKVYACEVTHQGLSSPVTKSFNRGEC

SEQ ID NO: 220 - protein, 576 aa, synthetic construct
  REGION 1..576: note = _
QVQLVQSGAEVKKPGASVKVSCKASGYTFTSYYIHWVRQAPGQGLEWIGSIYPGNVNTNYNEKFKDRATLTVDTSISTAYMELSRLRSDDTAVYFCTRSHYGLDWNFDVWGQGTTVTVSSASTRKAGGDIKLQQSGAELARPGASVKMSCKTSGYTFTRYTMHWVKQRPGQGLEWIGYINPSRGYTNYNQKFKDKATLTTDKSSSTAYMQLSSLTSEDSAVYYCARYYDDHYSLDYWGQGTTLTVSSASTKGPSVFPLAPSSKSTSGGTAALGCLVKDYFPEPVTVSWNSGALTSGVHTFPAVLQSSGLYSLSSVVTVPSSSLGTQTYICNVNHKPSNTKVDKKVEPKSCDKTHTCPPCPAPEAAGGPSVFLFPPKPKDTLMISRTPEVTCVVVDVSHEDPEVKFNWYVDGVEVHNAKTKPREEQYNSTYRVVSVLTVLHQDWLNGKEYKCKVSNKALAAPIEKTISKAKGQPREPQVCTLPPSRDELTKNQVSLSCAVKGFYPSDIAVEWESNGQPENNYKTTPPVLDSDGSFFLVSKLTVDKSRWQQGNVFSCSVMHEALHNHYTQKSLSLSPG

SEQ ID NO: 221 - protein, 328 aa, synthetic construct
  REGION 1..328: note = _
DIQMTQSPSSLSASVGDRVTITCHASQNIYVWLNWYQQKPGKAPKLLIYKASNLHTGVPSRFSGSGSGTDFTLTISSLQPEDFATYYCQQGQTYPYTFGGGTKVEIKASTRKAGGDIQLTQSPAIMSASPGEKVTMTCRASSSVSYMNWYQQKSGTSPKRWIYDTSKVASGVPYRFSGSGSGTSYSLTISSMEAEDAATYYCQQWSSNPLTFGAGTKLELKRTVAAPSVFIFPPSDEQLKSGTASVVCLLNNFYPREAKVQWKVDNALQSGNSQESVTEQDSKDSTYSLSSTLTLSKADYEKHKVYACEVTHQGLSSPVTKSFNRGEC

SEQ ID NO: 222 - protein, 575 aa, synthetic construct
  REGION 1..575: note = _
QVQLVQSGAEVKKPGASVKVSCKASGYTFTSYYIHWVRQAPGQGLEWIGSIYPGNVNTNYNEKFKDRATLTVDTSISTAYMELSRLRSDDTAVYFCTRSHYGLDWNFDVWGQGTTVTVSSASTRKAGDIKLQQSGAELARPGASVKMSCKTSGYTFTRYTMHWVKQRPGQGLEWIGYINPSRGYTNYNQKFKDKATLTTDKSSSTAYMQLSSLTSEDSAVYYCARYYDDHYSLDYWGQGTTLTVSSASTKGPSVFPLAPSSKSTSGGTAALGCLVKDYFPEPVTVSWNSGALTSGVHTFPAVLQSSGLYSLSSVVTVPSSSLGTQTYICNVNHKPSNTKVDKKVEPKSCDKTHTCPPCPAPEAAGGPSVFLFPPKPKDTLMISRTPEVTCVVVDVSHEDPEVKFNWYVDGVEVHNAKTKPREEQYNSTYRVVSVLTVLHQDWLNGKEYKCKVSNKALAAPIEKTISKAKGQPREPQVCTLPPSRDELTKNQVSLSCAVKGFYPSDIAVEWESNGQPENNYKTTPPVLDSDGSFFLVSKLTVDKSRWQQGNVFSCSVMHEALHNHYTQKSLSLSPG

SEQ ID NO: 223 - protein, 327 aa, synthetic construct
  REGION 1..327: note = _
DIQMTQSPSSLSASVGDRVTITCHASQNIYVWLNWYQQKPGKAPKLLIYKASNLHTGVPSRFSGSGSGTDFTLTISSLQPEDFATYYCQQGQTYPYTFGGGTKVEIKASTRKAGDIQLTQSPAIMSASPGEKVTMTCRASSSVSYMNWYQQKSGTSPKRWIYDTSKVASGVPYRFSGSGSGTSYSLTISSMEAEDAATYYCQQWSSNPLTFGAGTKLELKRTVAAPSVFIFPPSDEQLKSGTASVVCLLNNFYPREAKVQWKVDNALQSGNSQESVTEQDSKDSTYSLSSTLTLSKADYEKHKVYACEVTHQGLSSPVTKSFNRGEC

SEQ ID NO: 224 - protein, 725 aa, synthetic construct
  REGION 1..725: note = _
DIVMTQSPDSLAVSLGERATINCKSSQSLLYTSSQKNYLAWYQQKPGQPPKLLIYWASTRESGVPDRFSGSGSGTDFTLTISSLQAEDVAVYYCQQYYAYPWTFGGGTKLEIKGGSSGEIVLTQSPATLSLSPGERATLSCRASQSVDSYGNSFLHWYQQKPGQAPRLLIYWASNRATGIPARFSGSGSGTDFTLTISSLEPEDFAVYYCQQNNEDLWTFGGGTKLEIKGGGGSGGSGSGGGGSASGSGEVQLVESGGGLVKPGGSLRLSCAASGFTFQNYAMSWVRQAPGKGLEWVSSISSDATYTYYADSVKGRFTISRDNAKNVLYLQMTSLRAEDTAVYYCARHPPSYYYAFDYWGQGTTLTVSSGGSSGQVQLVQSGAEVVKPGASVKLSCKASGYTFTSYWLHWVRQAPGQGLEWVGMIDPSNSDTRFNPNFKDRVTITADTSTSTAYMELSSLRSEDTAVYYCATYKSYVSPLDYWGQGTSVTVSSASGGSGDKTHTCPPCPAPEAAGGPSVFLFPPKPKDTLMISRTPEVTCVVVDVSHEDPEVKFNWYVDGVEVHNAKTKPREEQYNSTYRVVSVLTVLHQDWLNGKEYKCKVSNKALAAPIEKTISKAKGQPREPQVYTLPPCRDELTKNQVSLWCLVKGFYPSDIAVEWESNGQPENNYKTTPPVLDSDGSFFLYSKLTVDKSRWQQGNVFSCSVMHEALHNHYTQKSLSLSPG

SEQ ID NO: 225 - protein, 725 aa, synthetic construct
  REGION 1..725: note = _
EIVLTQSPATLSLSPGERATLSCRASQSVDSYGNSFLHWYQQKPGQAPRLLIYWASNRATGIPARFSGSGSGTDFTLTISSLEPEDFAVYYCQQNNEDLWTFGGGTKLEIKGGSSGDIVMTQSPDSLAVSLGERATINCKSSQSLLYTSSQKNYLAWYQQKPGQPPKLLIYWASTRESGVPDRFSGSGSGTDFTLTISSLQAEDVAVYYCQQYYAYPWTFGGGTKLEIKGGGGSGGSGSGGGGSASGSGQVQLVQSGAEVVKPGASVKLSCKASGYTFTSYWLHWVRQAPGQGLEWVGMIDPSNSDTRFNPNFKDRVTITADTSTSTAYMELSSLRSEDTAVYYCATYKSYVSPLDYWGQGTSVTVSSGGSSGEVQLVESGGGLVKPGGSLRLSCAASGFTFQNYAMSWVRQAPGKGLEWVSSISSDATYTYYADSVKGRFTISRDNAKNVLYLQMTSLRAEDTAVYYCARHPPSYYYAFDYWGQGTTLTVSSASGGSGDKTHTCPPCPAPEAAGGPSVFLFPPKPKDTLMISRTPEVTCVVVDVSHEDPEVKFNWYVDGVEVHNAKTKPREEQYNSTYRVVSVLTVLHQDWLNGKEYKCKVSNKALAAPIEKTISKAKGQPREPQVYTLPPCRDELTKNQVSLWCLVKGFYPSDIAVEWESNGQPENNYKTTPPVLDSDGSFFLYSKLTVDKSRWQQGNVFSCSVMHEALHNHYTQKSLSLSPG

SEQ ID NO: 226 - protein, 573 aa, synthetic construct
  REGION 1..573: note = _
QVQLVQSGAEVKKPGASVKVSCKASGYTFTSYYIHWVRQAPGQGLEWIGSIYPGNVNTNYNEKFKDRATLTVDTSISTAYMELSRLRSDDTAVYFCTRSHYGLDWNFDVWGQGTTVTVSSGGSGSQVQLVQSGAEVAKPGASVKVSCKASGYTFTRYTMHWVKQAPGQGLEWIGYINPSRGYTNYAQKFQGKATLTTDKSTSTAYMELSSLRSEDTAVYYCARYYDDHYSLDYWGQGTTLTVSSASTKGPSVFPLAPSSKSTSGGTAALGCLVKDYFPEPVTVSWNSGALTSGVHTFPAVLQSSGLYSLSSVVTVPSSSLGTQTYICNVNHKPSNTKVDKKVEPKSCDKTHTCPPCPAPEAAGGPSVFLFPPKPKDTLMISRTPEVTCVVVDVSHEDPEVKFNWYVDGVEVHNAKTKPREEQYNSTYRVVSVLTVLHQDWLNGKEYKCKVSNKALAAPIEKTISKAKGQPREPQVCTLPPSRDELTKNQVSLSCAVKGFYPSDIAVEWESNGQPENNYKTTPPVLDSDGSFFLVSKLTVDKSRWQQGNVFSCSVMHEALHNHYTQKSLSLSPG

SEQ ID NO: 227 - protein, 325 aa, synthetic construct
  REGION 1..325: note = _
DIQMTQSPSSLSASVGDRVTITCHASQNIYVWLNWYQQKPGKAPKLLIYKASNLHTGVPSRFSGSGSGTDFTLTISSLQPEDFATYYCQQGQTYPYTFGGGTKVEIKGGSGSDIQLTQSPSSLSASVGDRVTITCRASQSISYLNWYQQKPGKSPKRWIYDTSKLASGVPSRFSGSGSGTDYTLTISSMQPEDAATYYCQQWSSNPLTFGGGTKVEIKRTVAAPSVFIFPPSDEQLKSGTASVVCLLNNFYPREAKVQWKVDNALQSGNSQESVTEQDSKDSTYSLSSTLTLSKADYEKHKVYACEVTHQGLSSPVTKSFNRGEC

SEQ ID NO: 228 - protein, 575 aa, synthetic construct
  REGION 1..575: note = _
QVQLVQSGAEVKKPGASVKVSCKASGYTFTSYYIHWVRQAPGQGLEWIGSIYPGNVNTNYNEKFKDRATLTVDTSISTAYMELSRLRSDDTAVYFCTRSHYGLDWNFDVWGQGTTVTVSSGPSGLVGQVQLVQSGAEVAKPGASVKVSCKASGYTFTRYTMHWVKQAPGQGLEWIGYINPSRGYTNYAQKFQGKATLTTDKSTSTAYMELSSLRSEDTAVYYCARYYDDHYSLDYWGQGTTLTVSSASTKGPSVFPLAPSSKSTSGGTAALGCLVKDYFPEPVTVSWNSGALTSGVHTFPAVLQSSGLYSLSSVVTVPSSSLGTQTYICNVNHKPSNTKVDKKVEPKSCDKTHTCPPCPAPEAAGGPSVFLFPPKPKDTLMISRTPEVTCVVVDVSHEDPEVKFNWYVDGVEVHNAKTKPREEQYNSTYRVVSVLTVLHQDWLNGKEYKCKVSNKALAAPIEKTISKAKGQPREPQVCTLPPSRDELTKNQVSLSCAVKGFYPSDIAVEWESNGQPENNYKTTPPVLDSDGSFFLVSKLTVDKSRWQQGNVFSCSVMHEALHNHYTQKSLSLSPG

SEQ ID NO: 229 - protein, 327 aa, synthetic construct
  REGION 1..327: note = _
DIQMTQSPSSLSASVGDRVTITCHASQNIYVWLNWYQQKPGKAPKLLIYKASNLHTGVPSRFSGSGSGTDFTLTISSLQPEDFATYYCQQGQTYPYTFGGGTKVEIKGPSGLVGDIQLTQSPSSLSASVGDRVTITCRASQSISYLNWYQQKPGKSPKRWIYDTSKLASGVPSRFSGSGSGTDYTLTISSMQPEDAATYYCQQWSSNPLTFGGGTKVEIKRTVAAPSVFIFPPSDEQLKSGTASVVCLLNNFYPREAKVQWKVDNALQSGNSQESVTEQDSKDSTYSLSSTLTLSKADYEKHKVYACEVTHQGLSSPVTKSFNRGEC

SEQ ID NO: 230 - protein, 576 aa, synthetic construct
  REGION 1..576: note = _
QVQLVQSGAEVKKPGASVKVSCKASGYTFTSYYIHWVRQAPGQGLEWIGSIYPGNVNTNYNEKFKDRATLTVDTSISTAYMELSRLRSDDTAVYFCTRSHYGLDWNFDVWGQGTTVTVSSASTRKAGGQVQLVQSGAEVAKPGASVKVSCKASGYTFTRYTMHWVKQAPGQGLEWIGYINPSRGYTNYAQKFQGKATLTTDKSTSTAYMELSSLRSEDTAVYYCARYYDDHYSLDYWGQGTTLTVSSASTKGPSVFPLAPSSKSTSGGTAALGCLVKDYFPEPVTVSWNSGALTSGVHTFPAVLQSSGLYSLSSVVTVPSSSLGTQTYICNVNHKPSNTKVDKKVEPKSCDKTHTCPPCPAPEAAGGPSVFLFPPKPKDTLMISRTPEVTCVVVDVSHEDPEVKFNWYVDGVEVHNAKTKPREEQYNSTYRVVSVLTVLHQDWLNGKEYKCKVSNKALAAPIEKTISKAKGQPREPQVCTLPPSRDELTKNQVSLSCAVKGFYPSDIAVEWESNGQPENNYKTTPPVLDSDGSFFLVSKLTVDKSRWQQGNVFSCSVMHEALHNHYTQKSLSLSPG

SEQ ID NO: 231 - protein, 328 aa, synthetic construct
  REGION 1..328: note = _
DIQMTQSPSSLSASVGDRVTITCHASQNIYVWLNWYQQKPGKAPKLLIYKASNLHTGVPSRFSGSGSGTDFTLTISSLQPEDFATYYCQQGQTYPYTFGGGTKVEIKASTRKAGGDIQLTQSPSSLSASVGDRVTITCRASQSISYLNWYQQKPGKSPKRWIYDTSKLASGVPSRFSGSGSGTDYTLTISSMQPEDAATYYCQQWSSNPLTFGGGTKVEIKRTVAAPSVFIFPPSDEQLKSGTASVVCLLNNFYPREAKVQWKVDNALQSGNSQESVTEQDSKDSTYSLSSTLTLSKADYEKHKVYACEVTHQGLSSPVTKSFNRGEC

SEQ ID NO: 232 - protein, 576 aa, synthetic construct
  REGION 1..576: note = _
QVQLVQSGAEVKKPGASVKVSCKASGYTFTSYYIHWVRQAPGQGLEWIGSIYPGNVNTNYNEKFKDRATLTVDTSISTAYMELSRLRSDDTAVYFCTRSHYGLDWNFDVWGQGTTVTVSSGLVGRKAGQVQLVQSGAEVAKPGASVKVSCKASGYTFTRYTMHWVKQAPGQGLEWIGYINPSRGYTNYAQKFQGKATLTTDKSTSTAYMELSSLRSEDTAVYYCARYYDDHYSLDYWGQGTTLTVSSASTKGPSVFPLAPSSKSTSGGTAALGCLVKDYFPEPVTVSWNSGALTSGVHTFPAVLQSSGLYSLSSVVTVPSSSLGTQTYICNVNHKPSNTKVDKKVEPKSCDKTHTCPPCPAPEAAGGPSVFLFPPKPKDTLMISRTPEVTCVVVDVSHEDPEVKFNWYVDGVEVHNAKTKPREEQYNSTYRVVSVLTVLHQDWLNGKEYKCKVSNKALAAPIEKTISKAKGQPREPQVCTLPPSRDELTKNQVSLSCAVKGFYPSDIAVEWESNGQPENNYKTTPPVLDSDGSFFLVSKLTVDKSRWQQGNVFSCSVMHEALHNHYTQKSLSLSPG

SEQ ID NO: 233 - protein, 328 aa, synthetic construct
  REGION 1..328: note = _
DIQMTQSPSSLSASVGDRVTITCHASQNIYVWLNWYQQKPGKAPKLLIYKASNLHTGVPSRFSGSGSGTDFTLTISSLQPEDFATYYCQQGQTYPYTFGGGTKVEIKGLVGRKAGDIQLTQSPSSLSASVGDRVTITCRASQSISYLNWYQQKPGKSPKRWIYDTSKLASGVPSRFSGSGSGTDYTLTISSMQPEDAATYYCQQWSSNPLTFGGGTKVEIKRTVAAPSVFIFPPSDEQLKSGTASVVCLLNNFYPREAKVQWKVDNALQSGNSQESVTEQDSKDSTYSLSSTLTLSKADYEKHKVYACEVTHQGLSSPVTKSFNRGEC

SEQ ID NO: 234 - protein, 718 aa, synthetic construct
  REGION 1..718: note = _
DIVMTQSPDSLAVSLGERATINCKSSQSLLYTSSQKNYLAWYQQKPGQPPKLLIYWASTRESGVPDRFSGSGSGTDFTLTISSLQAEDVAVYYCQQYYAYPWTFGGGTKLEIKGGSSGDIQMTQSPSSLSASVGDRVTITCQASQDINKYLAWYQKKPGKAPKLLIHYTSNLQTGVPSRFSGSGSGTDFTFTISSLQPEDIATYYCLQYDDLFTFGQGTKLEIKGGGGSGGSGSGGGGSASGSGQVQLVQSGAEVKKPGASVKVSCKASGSSFTGYTMNWVKQAPGQGLEWIGIINPYQGDTTYNQKFQGKVTITVDKSTSTVYMELSSLRSEDTAVYYCARGAGLYYFDYWGQGTTVTVSSGGSSGQVQLVQSGAEVVKPGASVKLSCKASGYTFTSYWLHWVRQAPGQGLEWVGMIDPSNSDTRFNPNFKDRVTITADTSTSTAYMELSSLRSEDTAVYYCATYKSYVSPLDYWGQGTSVTVSSASGGSGDKTHTCPPCPAPEAAGGPSVFLFPPKPKDTLMISRTPEVTCVVVDVSHEDPEVKFNWYVDGVEVHNAKTKPREEQYNSTYRVVSVLTVLHQDWLNGKEYKCKVSNKALAAPIEKTISKAKGQPREPQVYTLPPCRDELTKNQVSLWCLVKGFYPSDIAVEWESNGQPENNYKTTPPVLDSDGSFFLYSKLTVDKSRWQQGNVFSCSVMHEALHNHYTQKSLSLSPG

SEQ ID NO: 235 - protein, 718 aa, synthetic construct
  REGION 1..718: note = _
DIQMTQSPSSLSASVGDRVTITCQASQDINKYLAWYQKKPGKAPKLLIHYTSNLQTGVPSRFSGSGSGTDFTFTISSLQPEDIATYYCLQYDDLFTFGQGTKLEIKGGSSGDIVMTQSPDSLAVSLGERATINCKSSQSLLYTSSQKNYLAWYQQKPGQPPKLLIYWASTRESGVPDRFSGSGSGTDFTLTISSLQAEDVAVYYCQQYYAYPWTFGGGTKLEIKGGGGSGGSGSGGGGSASGSGQVQLVQSGAEVVKPGASVKLSCKASGYTFTSYWLHWVRQAPGQGLEWVGMIDPSNSDTRFNPNFKDRVTITADTSTSTAYMELSSLRSEDTAVYYCATYKSYVSPLDYWGQGTSVTVSSGGSSGQVQLVQSGAEVKKPGASVKVSCKASGSSFTGYTMNWVKQAPGQGLEWIGIINPYQGDTTYNQKFQGKVTITVDKSTSTVYMELSSLRSEDTAVYYCARGAGLYYFDYWGQGTTVTVSSASGGSGDKTHTCPPCPAPEAAGGPSVFLFPPKPKDTLMISRTPEVTCVVVDVSHEDPEVKFNWYVDGVEVHNAKTKPREEQYNSTYRVVSVLTVLHQDWLNGKEYKCKVSNKALAAPIEKTISKAKGQPREPQVYTLPPCRDELTKNQVSLWCLVKGFYPSDIAVEWESNGQPENNYKTTPPVLDSDGSFFLYSKLTVDKSRWQQGNVFSCSVMHEALHNHYTQKSLSLSPG

SEQ ID NO: 236 - protein, 328 aa, synthetic construct
  REGION 1..328: note = _
DIQMTQSPSSLSASVGDRVTITCHASQNIYVWLNWYQQKPGKAPKLLIYKASNLHTGVPSRFSGSGSGTDFTLTISSLQPEDFATYYCQQGQTYPYTFGCGTKVEIKGPAGLVSGDIQLTQSPSSLSASVGDRVTITCRASQSISYLNWYQQKPGKSPKRWIYDTSKLASGVPSRFSGSGSGTDYTLTISSMQPEDAATYYCQQWSSNPLTFGGGTKVEIKRTVAAPSVFIFPPSDEQLKSGTASVVCLLNNFYPREAKVQWKVDNALQSGNSQESVTEQDSKDSTYSLSSTLTLSKADYEKHKVYACEVTHQGLSSPVTKSFNRGEC

SEQ ID NO: 237 - protein, 576 aa, synthetic construct
  REGION 1..576: note = _
QVQLVQSGAEVKKPGASVKVSCKASGYTFTSYYIHWVRQAPGQCLEWIGSIYPGNVNTNYNEKFKDRATLTVDTSISTAYMELSRLRSDDTAVYFCTRSHYGLDWNFDVWGQGTTVTVSSGPAGLVSGQVQLVQSGAEVAKPGASVKVSCKASGYTFTRYTMHWVKQAPGQGLEWIGYINPSRGYTNYAQKFQGKATLTTDKSTSTAYMELSSLRSEDTAVYYCARYYDDHYSLDYWGQGTTLTVSSASTKGPSVFPLAPSSKSTSGGTAALGCLVKDYFPEPVTVSWNSGALTSGVHTFPAVLQSSGLYSLSSVVTVPSSSLGTQTYICNVNHKPSNTKVDKKVEPKSCDKTHTCPPCPAPEAAGGPSVFLFPPKPKDTLMISRTPEVTCVVVDVSHEDPEVKFNWYVDGVEVHNAKTKPREEQYNSTYRVVSVLTVLHQDWLNGKEYKCKVSNKALAAPIEKTISKAKGQPREPQVCTLPPSRDELTKNQVSLSCAVKGFYPSDIAVEWESNGQPENNYKTTPPVLDSDGSFFLVSKLTVDKSRWQQGNVFSCSVMHEALHNHYTQKSLSLSPG

SEQ ID NO: 238 - protein, 573 aa, synthetic construct
  REGION 1..573: note = _
QVQLVQSGAEVKKPGASVKVSCKASGYTFTSYYIHWVRQAPGQCLEWIGSIYPGNVNTNYNEKFKDRATLTVDTSISTAYMELSRLRSDDTAVYFCTRSHYGLDWNFDVWGQGTTVTVSSGGSGSQVQLVQSGAEVAKPGASVKVSCKASGYTFTRYTMHWVKQAPGQGLEWIGYINPSRGYTNYAQKFQGKATLTTDKSTSTAYMELSSLRSEDTAVYYCARYYDDHYSLDYWGQGTTLTVSSASTKGPSVFPLAPSSKSTSGGTAALGCLVKDYFPEPVTVSWNSGALTSGVHTFPAVLQSSGLYSLSSVVTVPSSSLGTQTYICNVNHKPSNTKVDKKVEPKSCDKTHTCPPCPAPEAAGGPSVFLFPPKPKDTLMISRTPEVTCVVVDVSHEDPEVKFNWYVDGVEVHNAKTKPREEQYNSTYRVVSVLTVLHQDWLNGKEYKCKVSNKALAAPIEKTISKAKGQPREPQVCTLPPSRDELTKNQVSLSCAVKGFYPSDIAVEWESNGQPENNYKTTPPVLDSDGSFFLVSKLTVDKSRWQQGNVFSCSVMHEALHNHYTQKSLSLSPG

SEQ ID NO: 239 - protein, 325 aa, synthetic construct
  REGION 1..325: note = _
DIQMTQSPSSLSASVGDRVTITCHASQNIYVWLNWYQQKPGKAPKLLIYKASNLHTGVPSRFSGSGSGTDFTLTISSLQPEDFATYYCQQGQTYPYTFGCGTKVEIKGGSGSDIQLTQSPSSLSASVGDRVTITCRASQSISYLNWYQQKPGKSPKRWIYDTSKLASGVPSRFSGSGSGTDYTLTISSMQPEDAATYYCQQWSSNPLTFGGGTKVEIKRTVAAPSVFIFPPSDEQLKSGTASVVCLLNNFYPREAKVQWKVDNALQSGNSQESVTEQDSKDSTYSLSSTLTLSKADYEKHKVYACEVTHQGLSSPVTKSFNRGEC

SEQ ID NO: 240 - protein, 328 aa, synthetic construct
  REGION 1..328: note = _
DIQMTQSPSSLSASVGDRVTITCHASQNIYVWLNWYQQKPGKAPKLLIYKASNLHTGVPSRFSGSGSGTDFTLTISSLQPEDFATYYCQQGQTYPYTFGCGTKVEIKASTRKAGGDIQLTQSPSSLSASVGDRVTITCRASQSISYLNWYQQKPGKSPKRWIYDTSKLASGVPSRFSGSGSGTDYTLTISSMQPEDAATYYCQQWSSNPLTFGGGTKVEIKRTVAAPSVFIFPPSDEQLKSGTASVVCLLNNFYPREAKVQWKVDNALQSGNSQESVTEQDSKDSTYSLSSTLTLSKADYEKHKVYACEVTHQGLSSPVTKSFNRGEC

SEQ ID NO: 241 - protein, 327 aa, synthetic construct
  REGION 1..327: note = _
DIQMTQSPSSLSASVGDRVTITCHASQNIYVWLNWYQQKPGKAPKLLIYKASNLHTGVPSRFSGSGSGTDFTLTISSLQPEDFATYYCQQGQTYPYTFGCGTKVEIKASTRKAGDIQLTQSPSSLSASVGDRVTITCRASQSISYLNWYQQKPGKSPKRWIYDTSKLASGVPSRFSGSGSGTDYTLTISSMQPEDAATYYCQQWSSNPLTFGGGTKVEIKRTVAAPSVFIFPPSDEQLKSGTASVVCLLNNFYPREAKVQWKVDNALQSGNSQESVTEQDSKDSTYSLSSTLTLSKADYEKHKVYACEVTHQGLSSPVTKSFNRGEC

SEQ ID NO: 242 - protein, 327 aa, synthetic construct
  REGION 1..327: note = _
DIQMTQSPSSLSASVGDRVTITCHASQNIYVWLNWYQQKPGKAPKLLIYKASNLHTGVPSRFSGSGSGTDFTLTISSLQPEDFATYYCQQGQTYPYTFGCGTKVEIKSTRKAGGDIQLTQSPSSLSASVGDRVTITCRASQSISYLNWYQQKPGKSPKRWIYDTSKLASGVPSRFSGSGSGTDYTLTISSMQPEDAATYYCQQWSSNPLTFGGGTKVEIKRTVAAPSVFIFPPSDEQLKSGTASVVCLLNNFYPREAKVQWKVDNALQSGNSQESVTEQDSKDSTYSLSSTLTLSKADYEKHKVYACEVTHQGLSSPVTKSFNRGEC

SEQ ID NO: 243 - protein, 576 aa, synthetic construct
  REGION 1..576: note = _
QVQLVQSGAEVKKPGASVKVSCKASGYTFTSYYIHWVRQAPGQCLEWIGSIYPGNVNTNYNEKFKDRATLTVDTSISTAYMELSRLRSDDTAVYFCTRSHYGLDWNFDVWGQGTTVTVSSASTRKAGGQVQLVQSGAEVAKPGASVKVSCKASGYTFTRYTMHWVKQAPGQGLEWIGYINPSRGYTNYAQKFQGKATLTTDKSTSTAYMELSSLRSEDTAVYYCARYYDDHYSLDYWGQGTTLTVSSASTKGPSVFPLAPSSKSTSGGTAALGCLVKDYFPEPVTVSWNSGALTSGVHTFPAVLQSSGLYSLSSVVTVPSSSLGTQTYICNVNHKPSNTKVDKKVEPKSCDKTHTCPPCPAPEAAGGPSVFLFPPKPKDTLMISRTPEVTCVVVDVSHEDPEVKFNWYVDGVEVHNAKTKPREEQYNSTYRVVSVLTVLHQDWLNGKEYKCKVSNKALAAPIEKTISKAKGQPREPQVCTLPPSRDELTKNQVSLSCAVKGFYPSDIAVEWESNGQPENNYKTTPPVLDSDGSFFLVSKLTVDKSRWQQGNVFSCSVMHEALHNHYTQKSLSLSPG

SEQ ID NO: 244 - protein, 575 aa, synthetic construct
  REGION 1..575: note = _
QVQLVQSGAEVKKPGASVKVSCKASGYTFTSYYIHWVRQAPGQCLEWIGSIYPGNVNTNYNEKFKDRATLTVDTSISTAYMELSRLRSDDTAVYFCTRSHYGLDWNFDVWGQGTTVTVSSASTRKAGQVQLVQSGAEVAKPGASVKVSCKASGYTFTRYTMHWVKQAPGQGLEWIGYINPSRGYTNYAQKFQGKATLTTDKSTSTAYMELSSLRSEDTAVYYCARYYDDHYSLDYWGQGTTLTVSSASTKGPSVFPLAPSSKSTSGGTAALGCLVKDYFPEPVTVSWNSGALTSGVHTFPAVLQSSGLYSLSSVVTVPSSSLGTQTYICNVNHKPSNTKVDKKVEPKSCDKTHTCPPCPAPEAAGGPSVFLFPPKPKDTLMISRTPEVTCVVVDVSHEDPEVKFNWYVDGVEVHNAKTKPREEQYNSTYRVVSVLTVLHQDWLNGKEYKCKVSNKALAAPIEKTISKAKGQPREPQVCTLPPSRDELTKNQVSLSCAVKGFYPSDIAVEWESNGQPENNYKTTPPVLDSDGSFFLVSKLTVDKSRWQQGNVFSCSVMHEALHNHYTQKSLSLSPG

SEQ ID NO: 245 - protein, 575 aa, synthetic construct
  REGION 1..575: note = _
QVQLVQSGAEVKKPGASVKVSCKASGYTFTSYYIHWVRQAPGQCLEWIGSIYPGNVNTNYNEKFKDRATLTVDTSISTAYMELSRLRSDDTAVYFCTRSHYGLDWNFDVWGQGTTVTVSSSTRKAGGQVQLVQSGAEVAKPGASVKVSCKASGYTFTRYTMHWVKQAPGQGLEWIGYINPSRGYTNYAQKFQGKATLTTDKSTSTAYMELSSLRSEDTAVYYCARYYDDHYSLDYWGQGTTLTVSSASTKGPSVFPLAPSSKSTSGGTAALGCLVKDYFPEPVTVSWNSGALTSGVHTFPAVLQSSGLYSLSSVVTVPSSSLGTQTYICNVNHKPSNTKVDKKVEPKSCDKTHTCPPCPAPEAAGGPSVFLFPPKPKDTLMISRTPEVTCVVVDVSHEDPEVKFNWYVDGVEVHNAKTKPREEQYNSTYRVVSVLTVLHQDWLNGKEYKCKVSNKALAAPIEKTISKAKGQPREPQVCTLPPSRDELTKNQVSLSCAVKGFYPSDIAVEWESNGQPENNYKTTPPVLDSDGSFFLVSKLTVDKSRWQQGNVFSCSVMHEALHNHYTQKSLSLSPG

SEQ ID NO: 246 - protein, 720 aa, synthetic construct
  REGION 1..720: note = _
EIVLTQSPATLSLSPGERATLSCRASQSVDSYGNSFLHWYQQKPGQAPRLLIYWASNRATGIPARFSGSGSGTDFTLTISSLEPEDFAVYYCQQNNEDLWTFGGGTKLEIKGGSSGDIQMTQSPSSLSASVGDRVTITCHASQNIYVWLNWYQQKPGKAPKLLIYKASNLHTGVPSRFSGSGSGTDFTLTISSLQPEDFATYYCQQGQTYPYTFGGGTKVEIKGGGGSGGSGSGGGGSASGSGQVQLVQSGAEVKKPGASVKVSCKASGYTFTSYYIHWVRQAPGQGLEWIGSIYPGNVNTNYNEKFKDRATLTVDTSISTAYMELSRLRSDDTAVYFCTRSHYGLDWNFDVWGQGTTVTVSSGGSSGEVQLVESGGGLVKPGGSLRLSCAASGFTFQNYAMSWVRQAPGKGLEWVSSISSDATYTYYADSVKGRFTISRDNAKNVLYLQMTSLRAEDTAVYYCARHPPSYYYAFDYWGQGTTLTVSSASGGSGDKTHTCPPCPAPEAAGGPSVFLFPPKPKDTLMISRTPEVTCVVVDVSHEDPEVKFNWYVDGVEVHNAKTKPREEQYNSTYRVVSVLTVLHQDWLNGKEYKCKVSNKALAAPIEKTISKAKGQPREPQVYTLPPCRDELTKNQVSLWCLVKGFYPSDIAVEWESNGQPENNYKTTPPVLDSDGSFFLYSKLTVDKSRWQQGNVFSCSVMHEALHNHYTQKSLSLSPG

SEQ ID NO: 247 - protein, 572 aa, synthetic construct
  REGION 1..572: note = _
QVQLVQSGAEVVKPGASVKLSCKASGYTFTSYWLHWVRQAPGQGLEWVGMIDPSNSDTRFNPNFKDRVTITADTSTSTAYMELSSLRSEDTAVYYCATYKSYVSPLDYWGQGTSVTVSSGGSGSQVQLVQSGAEVAKPGASVKVSCKASGYTFTRYTMHWVKQAPGQGLEWIGYINPSRGYTNYAQKFQGKATLTTDKSTSTAYMELSSLRSEDTAVYYCARYYDDHYSLDYWGQGTTLTVSSASTKGPSVFPLAPSSKSTSGGTAALGCLVKDYFPEPVTVSWNSGALTSGVHTFPAVLQSSGLYSLSSVVTVPSSSLGTQTYICNVNHKPSNTKVDKKVEPKSCDKTHTCPPCPAPEAAGGPSVFLFPPKPKDTLMISRTPEVTCVVVDVSHEDPEVKFNWYVDGVEVHNAKTKPREEQYNSTYRVVSVLTVLHQDWLNGKEYKCKVSNKALAAPIEKTISKAKGQPREPQVCTLPPSRDELTKNQVSLSCAVKGFYPSDIAVEWESNGQPENNYKTTPPVLDSDGSFFLVSKLTVDKSRWQQGNVFSCSVMHEALHNHYTQKSLSLSPG

SEQ ID NO: 248 - protein, 331 aa, synthetic construct
  REGION 1..331: note = _
DIVMTQSPDSLAVSLGERATINCKSSQSLLYTSSQKNYLAWYQQKPGQPPKLLIYWASTRESGVPDRFSGSGSGTDFTLTISSLQAEDVAVYYCQQYYAYPWTFGGGTKLEIKGGSGSDIQLTQSPSSLSASVGDRVTITCRASQSISYLNWYQQKPGKSPKRWIYDTSKLASGVPSRFSGSGSGTDYTLTISSMQPEDAATYYCQQWSSNPLTFGGGTKVEIKRTVAAPSVFIFPPSDEQLKSGTASVVCLLNNFYPREAKVQWKVDNALQSGNSQESVTEQDSKDSTYSLSSTLTLSKADYEKHKVYACEVTHQGLSSPVTKSFNRGEC

SEQ ID NO: 249 - protein, 575 aa, synthetic construct
  REGION 1..575: note = _
QVQLVQSGAEVVKPGASVKLSCKASGYTFTSYWLHWVRQAPGQGLEWVGMIDPSNSDTRFNPNFKDRVTITADTSTSTAYMELSSLRSEDTAVYYCATYKSYVSPLDYWGQGTSVTVSSGPAGLVSGQVQLVQSGAEVAKPGASVKVSCKASGYTFTRYTMHWVKQAPGQGLEWIGYINPSRGYTNYAQKFQGKATLTTDKSTSTAYMELSSLRSEDTAVYYCARYYDDHYSLDYWGQGTTLTVSSASTKGPSVFPLAPSSKSTSGGTAALGCLVKDYFPEPVTVSWNSGALTSGVHTFPAVLQSSGLYSLSSVVTVPSSSLGTQTYICNVNHKPSNTKVDKKVEPKSCDKTHTCPPCPAPEAAGGPSVFLFPPKPKDTLMISRTPEVTCVVVDVSHEDPEVKFNWYVDGVEVHNAKTKPREEQYNSTYRVVSVLTVLHQDWLNGKEYKCKVSNKALAAPIEKTISKAKGQPREPQVCTLPPSRDELTKNQVSLSCAVKGFYPSDIAVEWESNGQPENNYKTTPPVLDSDGSFFLVSKLTVDKSRWQQGNVFSCSVMHEALHNHYTQKSLSLSPG

SEQ ID NO: 250 - protein, 334 aa, synthetic construct
  REGION 1..334: note = _
DIVMTQSPDSLAVSLGERATINCKSSQSLLYTSSQKNYLAWYQQKPGQPPKLLIYWASTRESGVPDRFSGSGSGTDFTLTISSLQAEDVAVYYCQQYYAYPWTFGGGTKLEIKGPAGLVSGDIQLTQSPSSLSASVGDRVTITCRASQSISYLNWYQQKPGKSPKRWIYDTSKLASGVPSRFSGSGSGTDYTLTISSMQPEDAATYYCQQWSSNPLTFGGGTKVEIKRTVAAPSVFIFPPSDEQLKSGTASVVCLLNNFYPREAKVQWKVDNALQSGNSQESVTEQDSKDSTYSLSSTLTLSKADYEKHKVYACEVTHQGLSSPVTKSFNRGEC

SEQ ID NO: 251 - protein, 575 aa, synthetic construct
  REGION 1..575: note = _
QVQLVQSGAEVVKPGASVKLSCKASGYTFTSYWLHWVRQAPGQGLEWVGMIDPSNSDTRFNPNFKDRVTITADTSTSTAYMELSSLRSEDTAVYYCATYKSYVSPLDYWGQGTSVTVSSASTRKAGGQVQLVQSGAEVAKPGASVKVSCKASGYTFTRYTMHWVKQAPGQGLEWIGYINPSRGYTNYAQKFQGKATLTTDKSTSTAYMELSSLRSEDTAVYYCARYYDDHYSLDYWGQGTTLTVSSASTKGPSVFPLAPSSKSTSGGTAALGCLVKDYFPEPVTVSWNSGALTSGVHTFPAVLQSSGLYSLSSVVTVPSSSLGTQTYICNVNHKPSNTKVDKKVEPKSCDKTHTCPPCPAPEAAGGPSVFLFPPKPKDTLMISRTPEVTCVVVDVSHEDPEVKFNWYVDGVEVHNAKTKPREEQYNSTYRVVSVLTVLHQDWLNGKEYKCKVSNKALAAPIEKTISKAKGQPREPQVCTLPPSRDELTKNQVSLSCAVKGFYPSDIAVEWESNGQPENNYKTTPPVLDSDGSFFLVSKLTVDKSRWQQGNVFSCSVMHEALHNHYTQKSLSLSPG

SEQ ID NO: 252 - protein, 574 aa, synthetic construct
  REGION 1..574: note = _
QVQLVQSGAEVVKPGASVKLSCKASGYTFTSYWLHWVRQAPGQGLEWVGMIDPSNSDTRFNPNFKDRVTITADTSTSTAYMELSSLRSEDTAVYYCATYKSYVSPLDYWGQGTSVTVSSASTRKAGQVQLVQSGAEVAKPGASVKVSCKASGYTFTRYTMHWVKQAPGQGLEWIGYINPSRGYTNYAQKFQGKATLTTDKSTSTAYMELSSLRSEDTAVYYCARYYDDHYSLDYWGQGTTLTVSSASTKGPSVFPLAPSSKSTSGGTAALGCLVKDYFPEPVTVSWNSGALTSGVHTFPAVLQSSGLYSLSSVVTVPSSSLGTQTYICNVNHKPSNTKVDKKVEPKSCDKTHTCPPCPAPEAAGGPSVFLFPPKPKDTLMISRTPEVTCVVVDVSHEDPEVKFNWYVDGVEVHNAKTKPREEQYNSTYRVVSVLTVLHQDWLNGKEYKCKVSNKALAAPIEKTISKAKGQPREPQVCTLPPSRDELTKNQVSLSCAVKGFYPSDIAVEWESNGQPENNYKTTPPVLDSDGSFFLVSKLTVDKSRWQQGNVFSCSVMHEALHNHYTQKSLSLSPG

SEQ ID NO: 253 - protein, 574 aa, synthetic construct
  REGION 1..574: note = _
QVQLVQSGAEVVKPGASVKLSCKASGYTFTSYWLHWVRQAPGQGLEWVGMIDPSNSDTRFNPNFKDRVTITADTSTSTAYMELSSLRSEDTAVYYCATYKSYVSPLDYWGQGTSVTVSSSTRKAGGQVQLVQSGAEVAKPGASVKVSCKASGYTFTRYTMHWVKQAPGQGLEWIGYINPSRGYTNYAQKFQGKATLTTDKSTSTAYMELSSLRSEDTAVYYCARYYDDHYSLDYWGQGTTLTVSSASTKGPSVFPLAPSSKSTSGGTAALGCLVKDYFPEPVTVSWNSGALTSGVHTFPAVLQSSGLYSLSSVVTVPSSSLGTQTYICNVNHKPSNTKVDKKVEPKSCDKTHTCPPCPAPEAAGGPSVFLFPPKPKDTLMISRTPEVTCVVVDVSHEDPEVKFNWYVDGVEVHNAKTKPREEQYNSTYRVVSVLTVLHQDWLNGKEYKCKVSNKALAAPIEKTISKAKGQPREPQVCTLPPSRDELTKNQVSLSCAVKGFYPSDIAVEWESNGQPENNYKTTPPVLDSDGSFFLVSKLTVDKSRWQQGNVFSCSVMHEALHNHYTQKSLSLSPG

SEQ ID NO: 254 - protein, 334 aa, synthetic construct
  REGION 1..334: note = _
DIVMTQSPDSLAVSLGERATINCKSSQSLLYTSSQKNYLAWYQQKPGQPPKLLIYWASTRESGVPDRFSGSGSGTDFTLTISSLQAEDVAVYYCQQYYAYPWTFGGGTKLEIKASTRKAGGDIQLTQSPSSLSASVGDRVTITCRASQSISYLNWYQQKPGKSPKRWIYDTSKLASGVPSRFSGSGSGTDYTLTISSMQPEDAATYYCQQWSSNPLTFGGGTKVEIKRTVAAPSVFIFPPSDEQLKSGTASVVCLLNNFYPREAKVQWKVDNALQSGNSQESVTEQDSKDSTYSLSSTLTLSKADYEKHKVYACEVTHQGLSSPVTKSFNRGEC

SEQ ID NO: 255 - protein, 333 aa, synthetic construct
  REGION 1..333: note = _
DIVMTQSPDSLAVSLGERATINCKSSQSLLYTSSQKNYLAWYQQKPGQPPKLLIYWASTRESGVPDRFSGSGSGTDFTLTISSLQAEDVAVYYCQQYYAYPWTFGGGTKLEIKASTRKAGDIQLTQSPSSLSASVGDRVTITCRASQSISYLNWYQQKPGKSPKRWIYDTSKLASGVPSRFSGSGSGTDYTLTISSMQPEDAATYYCQQWSSNPLTFGGGTKVEIKRTVAAPSVFIFPPSDEQLKSGTASVVCLLNNFYPREAKVQWKVDNALQSGNSQESVTEQDSKDSTYSLSSTLTLSKADYEKHKVYACEVTHQGLSSPVTKSFNRGEC

SEQ ID NO: 256 - protein, 333 aa, synthetic construct
  REGION 1..333: note = _
DIVMTQSPDSLAVSLGERATINCKSSQSLLYTSSQKNYLAWYQQKPGQPPKLLIYWASTRESGVPDRFSGSGSGTDFTLTISSLQAEDVAVYYCQQYYAYPWTFGGGTKLEIKSTRKAGGDIQLTQSPSSLSASVGDRVTITCRASQSISYLNWYQQKPGKSPKRWIYDTSKLASGVPSRFSGSGSGTDYTLTISSMQPEDAATYYCQQWSSNPLTFGGGTKVEIKRTVAAPSVFIFPPSDEQLKSGTASVVCLLNNFYPREAKVQWKVDNALQSGNSQESVTEQDSKDSTYSLSSTLTLSKADYEKHKVYACEVTHQGLSSPVTKSFNRGEC

SEQ ID NO: 257 - protein, 721 aa, synthetic construct
  REGION 1..721: note = _
DIVMTQSPDSLAVSLGERATINCKSSQSLLYTSSQKNYLAWYQQKPGQPPKLLIYWASTRESGVPDRFSGSGSGTDFTLTISSLQAEDVAVYYCQQYYAYPWTFGGGTKLEIKGGSSGDIQMTQSPSSLSASVGDRVTITCHASQNIYVWLNWYQQKPGKAPKLLIYKASNLHTGVPSRFSGSGSGTDFTLTISSLQPEDFATYYCQQGQTYPYTFGGGTKVEIKGGGGSGGSGSGGGGSASGSGQVQLVQSGAEVKKPGASVKVSCKASGYTFTSYYIHWVRQAPGQGLEWIGSIYPGNVNTNYNEKFKDRATLTVDTSISTAYMELSRLRSDDTAVYFCTRSHYGLDWNFDVWGQGTTVTVSSGGSSGQVQLVQSGAEVVKPGASVKLSCKASGYTFTSYWLHWVRQAPGQGLEWVGMIDPSNSDTRFNPNFKDRVTITADTSTSTAYMELSSLRSEDTAVYYCATYKSYVSPLDYWGQGTSVTVSSASGGSGDKTHTCPPCPAPEAAGGPSVFLFPPKPKDTLMISRTPEVTCVVVDVSHEDPEVKFNWYVDGVEVHNAKTKPREEQYNSTYRVVSVLTVLHQDWLNGKEYKCKVSNKALAAPIEKTISKAKGQPREPQVYTLPPCRDELTKNQVSLWCLVKGFYPSDIAVEWESNGQPENNYKTTPPVLDSDGSFFLYSKLTVDKSRWQQGNVFSCSVMHEALHNHYTQKSLSLSPG

SEQ ID NO: 258 - protein, 573 aa, synthetic construct
  REGION 1..573: note = _
EVQLVESGGGLVKPGGSLRLSCAASGFTFQNYAMSWVRQAPGKGLEWVSSISSDATYTYYADSVKGRFTISRDNAKNVLYLQMTSLRAEDTAVYYCARHPPSYYYAFDYWGQGTTLTVSSGGSGSQVQLVQSGAEVAKPGASVKVSCKASGYTFTRYTMHWVKQAPGQGLEWIGYINPSRGYTNYAQKFQGKATLTTDKSTSTAYMELSSLRSEDTAVYYCARYYDDHYSLDYWGQGTTLTVSSASTKGPSVFPLAPSSKSTSGGTAALGCLVKDYFPEPVTVSWNSGALTSGVHTFPAVLQSSGLYSLSSVVTVPSSSLGTQTYICNVNHKPSNTKVDKKVEPKSCDKTHTCPPCPAPEAAGGPSVFLFPPKPKDTLMISRTPEVTCVVVDVSHEDPEVKFNWYVDGVEVHNAKTKPREEQYNSTYRVVSVLTVLHQDWLNGKEYKCKVSNKALAAPIEKTISKAKGQPREPQVCTLPPSRDELTKNQVSLSCAVKGFYPSDIAVEWESNGQPENNYKTTPPVLDSDGSFFLVSKLTVDKSRWQQGNVFSCSVMHEALHNHYTQKSLSLSPG

SEQ ID NO: 259 - protein, 222 aa, synthetic construct
  REGION 1..222: note = _
EIVLTQSPATLSLSPGERATLSCRASQSVDSYGNSFLHWYQQKPGQAPRLLIYWASNRATGIPARFSGSGSGTDFTLTISSLEPEDFAVYYCQQNNEDLWTFGGGTKLEIKGGSGSDIQLTQSPSSLSASVGDRVTITCRASQSISYLNWYQQKPGKSPKRWIYDTSKLASGVPSRFSGSGSGTDYTLTISSMQPEDAATYYCQQWSSNPLTFGGGTKVEIK

SEQ ID NO: 260 - protein, 576 aa, synthetic construct
  REGION 1..576: note = _
EVQLVESGGGLVKPGGSLRLSCAASGFTFQNYAMSWVRQAPGKGLEWVSSISSDATYTYYADSVKGRFTISRDNAKNVLYLQMTSLRAEDTAVYYCARHPPSYYYAFDYWGQGTTLTVSSGPAGLVSGQVQLVQSGAEVAKPGASVKVSCKASGYTFTRYTMHWVKQAPGQGLEWIGYINPSRGYTNYAQKFQGKATLTTDKSTSTAYMELSSLRSEDTAVYYCARYYDDHYSLDYWGQGTTLTVSSASTKGPSVFPLAPSSKSTSGGTAALGCLVKDYFPEPVTVSWNSGALTSGVHTFPAVLQSSGLYSLSSVVTVPSSSLGTQTYICNVNHKPSNTKVDKKVEPKSCDKTHTCPPCPAPEAAGGPSVFLFPPKPKDTLMISRTPEVTCVVVDVSHEDPEVKFNWYVDGVEVHNAKTKPREEQYNSTYRVVSVLTVLHQDWLNGKEYKCKVSNKALAAPIEKTISKAKGQPREPQVCTLPPSRDELTKNQVSLSCAVKGFYPSDIAVEWESNGQPENNYKTTPPVLDSDGSFFLVSKLTVDKSRWQQGNVFSCSVMHEALHNHYTQKSLSLSPG

SEQ ID NO: 261 - protein, 225 aa, synthetic construct
  REGION 1..225: note = _
EIVLTQSPATLSLSPGERATLSCRASQSVDSYGNSFLHWYQQKPGQAPRLLIYWASNRATGIPARFSGSGSGTDFTLTISSLEPEDFAVYYCQQNNEDLWTFGGGTKLEIKGPAGLVSGDIQLTQSPSSLSASVGDRVTITCRASQSISYLNWYQQKPGKSPKRWIYDTSKLASGVPSRFSGSGSGTDYTLTISSMQPEDAATYYCQQWSSNPLTFGGGTKVEIK

SEQ ID NO: 262 - protein, 576 aa, synthetic construct
  REGION 1..576: note = _
EVQLVESGGGLVKPGGSLRLSCAASGFTFQNYAMSWVRQAPGKGLEWVSSISSDATYTYYADSVKGRFTISRDNAKNVLYLQMTSLRAEDTAVYYCARHPPSYYYAFDYWGQGTTLTVSSASTRKAGGQVQLVQSGAEVAKPGASVKVSCKASGYTFTRYTMHWVKQAPGQGLEWIGYINPSRGYTNYAQKFQGKATLTTDKSTSTAYMELSSLRSEDTAVYYCARYYDDHYSLDYWGQGTTLTVSSASTKGPSVFPLAPSSKSTSGGTAALGCLVKDYFPEPVTVSWNSGALTSGVHTFPAVLQSSGLYSLSSVVTVPSSSLGTQTYICNVNHKPSNTKVDKKVEPKSCDKTHTCPPCPAPEAAGGPSVFLFPPKPKDTLMISRTPEVTCVVVDVSHEDPEVKFNWYVDGVEVHNAKTKPREEQYNSTYRVVSVLTVLHQDWLNGKEYKCKVSNKALAAPIEKTISKAKGQPREPQVCTLPPSRDELTKNQVSLSCAVKGFYPSDIAVEWESNGQPENNYKTTPPVLDSDGSFFLVSKLTVDKSRWQQGNVFSCSVMHEALHNHYTQKSLSLSPG

SEQ ID NO: 263 - protein, 575 aa, synthetic construct
  REGION 1..575: note = _
EVQLVESGGGLVKPGGSLRLSCAASGFTFQNYAMSWVRQAPGKGLEWVSSISSDATYTYYADSVKGRFTISRDNAKNVLYLQMTSLRAEDTAVYYCARHPPSYYYAFDYWGQGTTLTVSSASTRKAGQVQLVQSGAEVAKPGASVKVSCKASGYTFTRYTMHWVKQAPGQGLEWIGYINPSRGYTNYAQKFQGKATLTTDKSTSTAYMELSSLRSEDTAVYYCARYYDDHYSLDYWGQGTTLTVSSASTKGPSVFPLAPSSKSTSGGTAALGCLVKDYFPEPVTVSWNSGALTSGVHTFPAVLQSSGLYSLSSVVTVPSSSLGTQTYICNVNHKPSNTKVDKKVEPKSCDKTHTCPPCPAPEAAGGPSVFLFPPKPKDTLMISRTPEVTCVVVDVSHEDPEVKFNWYVDGVEVHNAKTKPREEQYNSTYRVVSVLTVLHQDWLNGKEYKCKVSNKALAAPIEKTISKAKGQPREPQVCTLPPSRDELTKNQVSLSCAVKGFYPSDIAVEWESNGQPENNYKTTPPVLDSDGSFFLVSKLTVDKSRWQQGNVFSCSVMHEALHNHYTQKSLSLSPG

SEQ ID NO: 264 - protein, 575 aa, synthetic construct
  REGION 1..575: note = _
EVQLVESGGGLVKPGGSLRLSCAASGFTFQNYAMSWVRQAPGKGLEWVSSISSDATYTYYADSVKGRFTISRDNAKNVLYLQMTSLRAEDTAVYYCARHPPSYYYAFDYWGQGTTLTVSSSTRKAGGQVQLVQSGAEVAKPGASVKVSCKASGYTFTRYTMHWVKQAPGQGLEWIGYINPSRGYTNYAQKFQGKATLTTDKSTSTAYMELSSLRSEDTAVYYCARYYDDHYSLDYWGQGTTLTVSSASTKGPSVFPLAPSSKSTSGGTAALGCLVKDYFPEPVTVSWNSGALTSGVHTFPAVLQSSGLYSLSSVVTVPSSSLGTQTYICNVNHKPSNTKVDKKVEPKSCDKTHTCPPCPAPEAAGGPSVFLFPPKPKDTLMISRTPEVTCVVVDVSHEDPEVKFNWYVDGVEVHNAKTKPREEQYNSTYRVVSVLTVLHQDWLNGKEYKCKVSNKALAAPIEKTISKAKGQPREPQVCTLPPSRDELTKNQVSLSCAVKGFYPSDIAVEWESNGQPENNYKTTPPVLDSDGSFFLVSKLTVDKSRWQQGNVFSCSVMHEALHNHYTQKSLSLSPG

SEQ ID NO: 265 - protein, 225 aa, synthetic construct
  REGION 1..225: note = _
EIVLTQSPATLSLSPGERATLSCRASQSVDSYGNSFLHWYQQKPGQAPRLLIYWASNRATGIPARFSGSGSGTDFTLTISSLEPEDFAVYYCQQNNEDLWTFGGGTKLEIKASTRKAGGDIQLTQSPSSLSASVGDRVTITCRASQSISYLNWYQQKPGKSPKRWIYDTSKLASGVPSRFSGSGSGTDYTLTISSMQPEDAATYYCQQWSSNPLTFGGGTKVEIK

SEQ ID NO: 266 - protein, 224 aa, synthetic construct
  REGION 1..224: note = _
EIVLTQSPATLSLSPGERATLSCRASQSVDSYGNSFLHWYQQKPGQAPRLLIYWASNRATGIPARFSGSGSGTDFTLTISSLEPEDFAVYYCQQNNEDLWTFGGGTKLEIKASTRKAGDIQLTQSPSSLSASVGDRVTITCRASQSISYLNWYQQKPGKSPKRWIYDTSKLASGVPSRFSGSGSGTDYTLTISSMQPEDAATYYCQQWSSNPLTFGGGTKVEIK

SEQ ID NO: 267 - protein, 224 aa, synthetic construct
  REGION 1..224: note = _
EIVLTQSPATLSLSPGERATLSCRASQSVDSYGNSFLHWYQQKPGQAPRLLIYWASNRATGIPARFSGSGSGTDFTLTISSLEPEDFAVYYCQQNNEDLWTFGGGTKLEIKSTRKAGGDIQLTQSPSSLSASVGDRVTITCRASQSISYLNWYQQKPGKSPKRWIYDTSKLASGVPSRFSGSGSGTDYTLTISSMQPEDAATYYCQQWSSNPLTFGGGTKVEIK

SEQ ID NO: 268 - protein, 713 aa, synthetic construct
  REGION 1..713: note = _
DIQMTQSPSSLSASVGDRVTITCQASQDINKYLAWYQKKPGKAPKLLIHYTSNLQTGVPSRFSGSGSGTDFTFTISSLQPEDIATYYCLQYDDLFTFGQGTKLEIKGGSSGDIQMTQSPSSLSASVGDRVTITCHASQNIYVWLNWYQQKPGKAPKLLIYKASNLHTGVPSRFSGSGSGTDFTLTISSLQPEDFATYYCQQGQTYPYTFGGGTKVEIKGGGGSGGSGSGGGGSASGSGQVQLVQSGAEVKKPGASVKVSCKASGYTFTSYYIHWVRQAPGQGLEWIGSIYPGNVNTNYNEKFKDRATLTVDTSISTAYMELSRLRSDDTAVYFCTRSHYGLDWNFDVWGQGTTVTVSSGGSSGQVQLVQSGAEVKKPGASVKVSCKASGSSFTGYTMNWVKQAPGQGLEWIGIINPYQGDTTYNQKFQGKVTITVDKSTSTVYMELSSLRSEDTAVYYCARGAGLYYFDYWGQGTTVTVSSASGGSGDKTHTCPPCPAPEAAGGPSVFLFPPKPKDTLMISRTPEVTCVVVDVSHEDPEVKFNWYVDGVEVHNAKTKPREEQYNSTYRVVSVLTVLHQDWLNGKEYKCKVSNKALAAPIEKTISKAKGQPREPQVYTLPPCRDELTKNQVSLWCLVKGFYPSDIAVEWESNGQPENNYKTTPPVLDSDGSFFLYSKLTVDKSRWQQGNVFSCSVMHEALHNHYTQKSLSLSPG

SEQ ID NO: 269 - protein, 713 aa, synthetic construct
  REGION 1..713: note = _
DIQMTQSPSSLSASVGDRVTITCHASQNIYVWLNWYQQKPGKAPKLLIYKASNLHTGVPSRFSGSGSGTDFTLTISSLQPEDFATYYCQQGQTYPYTFGGGTKVEIKGGSSGDIQMTQSPSSLSASVGDRVTITCQASQDINKYLAWYQKKPGKAPKLLIHYTSNLQTGVPSRFSGSGSGTDFTFTISSLQPEDIATYYCLQYDDLFTFGQGTKLEIKGGGGSGGSGSGGGGSASGSGQVQLVQSGAEVKKPGASVKVSCKASGSSFTGYTMNWVKQAPGQGLEWIGIINPYQGDTTYNQKFQGKVTITVDKSTSTVYMELSSLRSEDTAVYYCARGAGLYYFDYWGQGTTVTVSSGGSSGQVQLVQSGAEVKKPGASVKVSCKASGYTFTSYYIHWVRQAPGQGLEWIGSIYPGNVNTNYNEKFKDRATLTVDTSISTAYMELSRLRSDDTAVYFCTRSHYGLDWNFDVWGQGTTVTVSSASGGSGDKTHTCPPCPAPEAAGGPSVFLFPPKPKDTLMISRTPEVTCVVVDVSHEDPEVKFNWYVDGVEVHNAKTKPREEQYNSTYRVVSVLTVLHQDWLNGKEYKCKVSNKALAAPIEKTISKAKGQPREPQVYTLPPCRDELTKNQVSLWCLVKGFYPSDIAVEWESNGQPENNYKTTPPVLDSDGSFFLYSKLTVDKSRWQQGNVFSCSVMHEALHNHYTQKSLSLSPG

SEQ ID NO: 270 - protein, 571 aa, synthetic construct
  REGION 1..571: note = _
QVQLVQSGAEVKKPGASVKVSCKASGSSFTGYTMNWVKQAPGQGLEWIGIINPYQGDTTYNQKFQGKVTITVDKSTSTVYMELSSLRSEDTAVYYCARGAGLYYFDYWGQGTTVTVSSGGSGSQVQLVQSGAEVAKPGASVKVSCKASGYTFTRYTMHWVKQAPGQGLEWIGYINPSRGYTNYAQKFQGKATLTTDKSTSTAYMELSSLRSEDTAVYYCARYYDDHYSLDYWGQGTTLTVSSASTKGPSVFPLAPSSKSTSGGTAALGCLVKDYFPEPVTVSWNSGALTSGVHTFPAVLQSSGLYSLSSVVTVPSSSLGTQTYICNVNHKPSNTKVDKKVEPKSCDKTHTCPPCPAPEAAGGPSVFLFPPKPKDTLMISRTPEVTCVVVDVSHEDPEVKFNWYVDGVEVHNAKTKPREEQYNSTYRVVSVLTVLHQDWLNGKEYKCKVSNKALAAPIEKTISKAKGQPREPQVCTLPPSRDELTKNQVSLSCAVKGFYPSDIAVEWESNGQPENNYKTTPPVLDSDGSFFLVSKLTVDKSRWQQGNVFSCSVMHEALHNHYTQKSLSLSPG

SEQ ID NO: 271 - protein, 324 aa, synthetic construct
  REGION 1..324: note = _
DIQMTQSPSSLSASVGDRVTITCQASQDINKYLAWYQKKPGKAPKLLIHYTSNLQTGVPSRFSGSGSGTDFTFTISSLQPEDIATYYCLQYDDLFTFGQGTKLEIKGGSGSDIQLTQSPSSLSASVGDRVTITCRASQSISYLNWYQQKPGKSPKRWIYDTSKLASGVPSRFSGSGSGTDYTLTISSMQPEDAATYYCQQWSSNPLTFGGGTKVEIKRTVAAPSVFIFPPSDEQLKSGTASVVCLLNNFYPREAKVQWKVDNALQSGNSQESVTEQDSKDSTYSLSSTLTLSKADYEKHKVYACEVTHQGLSSPVTKSFNRGEC

SEQ ID NO: 272 - protein, 574 aa, synthetic construct
  REGION 1..574: note = _
QVQLVQSGAEVKKPGASVKVSCKASGSSFTGYTMNWVKQAPGQGLEWIGIINPYQGDTTYNQKFQGKVTITVDKSTSTVYMELSSLRSEDTAVYYCARGAGLYYFDYWGQGTTVTVSSGPAGLVSGQVQLVQSGAEVAKPGASVKVSCKASGYTFTRYTMHWVKQAPGQGLEWIGYINPSRGYTNYAQKFQGKATLTTDKSTSTAYMELSSLRSEDTAVYYCARYYDDHYSLDYWGQGTTLTVSSASTKGPSVFPLAPSSKSTSGGTAALGCLVKDYFPEPVTVSWNSGALTSGVHTFPAVLQSSGLYSLSSVVTVPSSSLGTQTYICNVNHKPSNTKVDKKVEPKSCDKTHTCPPCPAPEAAGGPSVFLFPPKPKDTLMISRTPEVTCVVVDVSHEDPEVKFNWYVDGVEVHNAKTKPREEQYNSTYRVVSVLTVLHQDWLNGKEYKCKVSNKALAAPIEKTISKAKGQPREPQVCTLPPSRDELTKNQVSLSCAVKGFYPSDIAVEWESNGQPENNYKTTPPVLDSDGSFFLVSKLTVDKSRWQQGNVFSCSVMHEALHNHYTQKSLSLSPG

SEQ ID NO: 273 - protein, 327 aa, synthetic construct
  REGION 1..327: note = _
DIQMTQSPSSLSASVGDRVTITCQASQDINKYLAWYQKKPGKAPKLLIHYTSNLQTGVPSRFSGSGSGTDFTFTISSLQPEDIATYYCLQYDDLFTFGQGTKLEIKGPAGLVSGDIQLTQSPSSLSASVGDRVTITCRASQSISYLNWYQQKPGKSPKRWIYDTSKLASGVPSRFSGSGSGTDYTLTISSMQPEDAATYYCQQWSSNPLTFGGGTKVEIKRTVAAPSVFIFPPSDEQLKSGTASVVCLLNNFYPREAKVQWKVDNALQSGNSQESVTEQDSKDSTYSLSSTLTLSKADYEKHKVYACEVTHQGLSSPVTKSFNRGEC

SEQ ID NO: 274 - protein, 574 aa, synthetic construct
  REGION 1..574: note = _
QVQLVQSGAEVKKPGASVKVSCKASGSSFTGYTMNWVKQAPGQGLEWIGIINPYQGDTTYNQKFQGKVTITVDKSTSTVYMELSSLRSEDTAVYYCARGAGLYYFDYWGQGTTVTVSSASTRKAGGQVQLVQSGAEVAKPGASVKVSCKASGYTFTRYTMHWVKQAPGQGLEWIGYINPSRGYTNYAQKFQGKATLTTDKSTSTAYMELSSLRSEDTAVYYCARYYDDHYSLDYWGQGTTLTVSSASTKGPSVFPLAPSSKSTSGGTAALGCLVKDYFPEPVTVSWNSGALTSGVHTFPAVLQSSGLYSLSSVVTVPSSSLGTQTYICNVNHKPSNTKVDKKVEPKSCDKTHTCPPCPAPEAAGGPSVFLFPPKPKDTLMISRTPEVTCVVVDVSHEDPEVKFNWYVDGVEVHNAKTKPREEQYNSTYRVVSVLTVLHQDWLNGKEYKCKVSNKALAAPIEKTISKAKGQPREPQVCTLPPSRDELTKNQVSLSCAVKGFYPSDIAVEWESNGQPENNYKTTPPVLDSDGSFFLVSKLTVDKSRWQQGNVFSCSVMHEALHNHYTQKSLSLSPG

SEQ ID NO: 275 - protein, 573 aa, synthetic construct
  REGION 1..573: note = _
QVQLVQSGAEVKKPGASVKVSCKASGSSFTGYTMNWVKQAPGQGLEWIGIINPYQGDTTYNQKFQGKVTITVDKSTSTVYMELSSLRSEDTAVYYCARGAGLYYFDYWGQGTTVTVSSASTRKAGQVQLVQSGAEVAKPGASVKVSCKASGYTFTRYTMHWVKQAPGQGLEWIGYINPSRGYTNYAQKFQGKATLTTDKSTSTAYMELSSLRSEDTAVYYCARYYDDHYSLDYWGQGTTLTVSSASTKGPSVFPLAPSSKSTSGGTAALGCLVKDYFPEPVTVSWNSGALTSGVHTFPAVLQSSGLYSLSSVVTVPSSSLGTQTYICNVNHKPSNTKVDKKVEPKSCDKTHTCPPCPAPEAAGGPSVFLFPPKPKDTLMISRTPEVTCVVVDVSHEDPEVKFNWYVDGVEVHNAKTKPREEQYNSTYRVVSVLTVLHQDWLNGKEYKCKVSNKALAAPIEKTISKAKGQPREPQVCTLPPSRDELTKNQVSLSCAVKGFYPSDIAVEWESNGQPENNYKTTPPVLDSDGSFFLVSKLTVDKSRWQQGNVFSCSVMHEALHNHYTQKSLSLSPG

SEQ ID NO: 276 - protein, 573 aa, synthetic construct
  REGION 1..573: note = _
QVQLVQSGAEVKKPGASVKVSCKASGSSFTGYTMNWVKQAPGQGLEWIGIINPYQGDTTYNQKFQGKVTITVDKSTSTVYMELSSLRSEDTAVYYCARGAGLYYFDYWGQGTTVTVSSSTRKAGGQVQLVQSGAEVAKPGASVKVSCKASGYTFTRYTMHWVKQAPGQGLEWIGYINPSRGYTNYAQKFQGKATLTTDKSTSTAYMELSSLRSEDTAVYYCARYYDDHYSLDYWGQGTTLTVSSASTKGPSVFPLAPSSKSTSGGTAALGCLVKDYFPEPVTVSWNSGALTSGVHTFPAVLQSSGLYSLSSVVTVPSSSLGTQTYICNVNHKPSNTKVDKKVEPKSCDKTHTCPPCPAPEAAGGPSVFLFPPKPKDTLMISRTPEVTCVVVDVSHEDPEVKFNWYVDGVEVHNAKTKPREEQYNSTYRVVSVLTVLHQDWLNGKEYKCKVSNKALAAPIEKTISKAKGQPREPQVCTLPPSRDELTKNQVSLSCAVKGFYPSDIAVEWESNGQPENNYKTTPPVLDSDGSFFLVSKLTVDKSRWQQGNVFSCSVMHEALHNHYTQKSLSLSPG

SEQ ID NO: 277 - protein, 327 aa, synthetic construct
  REGION 1..327: note = _
DIQMTQSPSSLSASVGDRVTITCQASQDINKYLAWYQKKPGKAPKLLIHYTSNLQTGVPSRFSGSGSGTDFTFTISSLQPEDIATYYCLQYDDLFTFGQGTKLEIKASTRKAGGDIQLTQSPSSLSASVGDRVTITCRASQSISYLNWYQQKPGKSPKRWIYDTSKLASGVPSRFSGSGSGTDYTLTISSMQPEDAATYYCQQWSSNPLTFGGGTKVEIKRTVAAPSVFIFPPSDEQLKSGTASVVCLLNNFYPREAKVQWKVDNALQSGNSQESVTEQDSKDSTYSLSSTLTLSKADYEKHKVYACEVTHQGLSSPVTKSFNRGEC

SEQ ID NO: 278 - protein, 326 aa, synthetic construct
  REGION 1..326: note = _
DIQMTQSPSSLSASVGDRVTITCQASQDINKYLAWYQKKPGKAPKLLIHYTSNLQTGVPSRFSGSGSGTDFTFTISSLQPEDIATYYCLQYDDLFTFGQGTKLEIKASTRKAGDIQLTQSPSSLSASVGDRVTITCRASQSISYLNWYQQKPGKSPKRWIYDTSKLASGVPSRFSGSGSGTDYTLTISSMQPEDAATYYCQQWSSNPLTFGGGTKVEIKRTVAAPSVFIFPPSDEQLKSGTASVVCLLNNFYPREAKVQWKVDNALQSGNSQESVTEQDSKDSTYSLSSTLTLSKADYEKHKVYACEVTHQGLSSPVTKSFNRGEC

SEQ ID NO: 279 - protein, 326 aa, synthetic construct
  REGION 1..326: note = _
DIQMTQSPSSLSASVGDRVTITCQASQDINKYLAWYQKKPGKAPKLLIHYTSNLQTGVPSRFSGSGSGTDFTFTISSLQPEDIATYYCLQYDDLFTFGQGTKLEIKSTRKAGGDIQLTQSPSSLSASVGDRVTITCRASQSISYLNWYQQKPGKSPKRWIYDTSKLASGVPSRFSGSGSGTDYTLTISSMQPEDAATYYCQQWSSNPLTFGGGTKVEIKRTVAAPSVFIFPPSDEQLKSGTASVVCLLNNFYPREAKVQWKVDNALQSGNSQESVTEQDSKDSTYSLSSTLTLSKADYEKHKVYACEVTHQGLSSPVTKSFNRGEC

SEQ ID NO: 280 - protein, 726 aa, synthetic construct
  REGION 1..726: note = _
DIVMTQSPDSLAVSLGERATINCKSSQSLLYTSSQKNYLAWYQQKPGQPPKLLIYWASTRESGVPDRFSGSGSGTDFTLTISSLQAEDVAVYYCQQYYAYPWTFGGGTKLEIKGGSSGDIVMTQSPDSLAVSLGERATINCKSSQSLLYTSSQKNYLAWYQQKPGQPPKLLIYWASTRESGVPDRFSGSGSGTDFTLTISSLQAEDVAVYYCQQYYAYPWTFGGGTKLEIKGGGGSGGSGSGGGGSASGSGQVQLVQSGAEVVKPGASVKLSCKASGYTFTSYWLHWVRQAPGQGLEWVGMIDPSNSDTRFNPNFKDRVTITADTSTSTAYMELSSLRSEDTAVYYCATYKSYVSPLDYWGQGTSVTVSSGGSSGQVQLVQSGAEVVKPGASVKLSCKASGYTFTSYWLHWVRQAPGQGLEWVGMIDPSNSDTRFNPNFKDRVTITADTSTSTAYMELSSLRSEDTAVYYCATYKSYVSPLDYWGQGTSVTVSSASGGSGDKTHTCPPCPAPEAAGGPSVFLFPPKPKDTLMISRTPEVTCVVVDVSHEDPEVKFNWYVDGVEVHNAKTKPREEQYNSTYRVVSVLTVLHQDWLNGKEYKCKVSNKALAAPIEKTISKAKGQPREPQVYTLPPCRDELTKNQVSLWCLVKGFYPSDIAVEWESNGQPENNYKTTPPVLDSDGSFFLYSKLTVDKSRWQQGNVFSCSVMHEALHNHYTQKSLSLSPG

SEQ ID NO: 281 - protein, 724 aa, synthetic construct
  REGION 1..724: note = _
EIVLTQSPATLSLSPGERATLSCRASQSVDSYGNSFLHWYQQKPGQAPRLLIYWASNRATGIPARFSGSGSGTDFTLTISSLEPEDFAVYYCQQNNEDLWTFGGGTKLEIKGGSSGEIVLTQSPATLSLSPGERATLSCRASQSVDSYGNSFLHWYQQKPGQAPRLLIYWASNRATGIPARFSGSGSGTDFTLTISSLEPEDFAVYYCQQNNEDLWTFGGGTKLEIKGGGGSGGSGSGGGGSASGSGEVQLVESGGGLVKPGGSLRLSCAASGFTFQNYAMSWVRQAPGKGLEWVSSISSDATYTYYADSVKGRFTISRDNAKNVLYLQMTSLRAEDTAVYYCARHPPSYYYAFDYWGQGTTLTVSSGGSSGEVQLVESGGGLVKPGGSLRLSCAASGFTFQNYAMSWVRQAPGKGLEWVSSISSDATYTYYADSVKGRFTISRDNAKNVLYLQMTSLRAEDTAVYYCARHPPSYYYAFDYWGQGTTLTVSSASGGSGDKTHTCPPCPAPEAAGGPSVFLFPPKPKDTLMISRTPEVTCVVVDVSHEDPEVKFNWYVDGVEVHNAKTKPREEQYNSTYRVVSVLTVLHQDWLNGKEYKCKVSNKALAAPIEKTISKAKGQPREPQVYTLPPCRDELTKNQVSLWCLVKGFYPSDIAVEWESNGQPENNYKTTPPVLDSDGSFFLYSKLTVDKSRWQQGNVFSCSVMHEALHNHYTQKSLSLSPG

SEQ ID NO: 282 - protein, 710 aa, synthetic construct
  REGION 1..710: note = _
DIQMTQSPSSLSASVGDRVTITCQASQDINKYLAWYQKKPGKAPKLLIHYTSNLQTGVPSRFSGSGSGTDFTFTISSLQPEDIATYYCLQYDDLFTFGQGTKLEIKGGSSGDIQMTQSPSSLSASVGDRVTITCQASQDINKYLAWYQKKPGKAPKLLIHYTSNLQTGVPSRFSGSGSGTDFTFTISSLQPEDIATYYCLQYDDLFTFGQGTKLEIKGGGGSGGSGSGGGGSASGSGQVQLVQSGAEVKKPGASVKVSCKASGSSFTGYTMNWVKQAPGQGLEWIGIINPYQGDTTYNQKFQGKVTITVDKSTSTVYMELSSLRSEDTAVYYCARGAGLYYFDYWGQGTTVTVSSGGSSGQVQLVQSGAEVKKPGASVKVSCKASGSSFTGYTMNWVKQAPGQGLEWIGIINPYQGDTTYNQKFQGKVTITVDKSTSTVYMELSSLRSEDTAVYYCARGAGLYYFDYWGQGTTVTVSSASGGSGDKTHTCPPCPAPEAAGGPSVFLFPPKPKDTLMISRTPEVTCVVVDVSHEDPEVKFNWYVDGVEVHNAKTKPREEQYNSTYRVVSVLTVLHQDWLNGKEYKCKVSNKALAAPIEKTISKAKGQPREPQVYTLPPCRDELTKNQVSLWCLVKGFYPSDIAVEWESNGQPENNYKTTPPVLDSDGSFFLYSKLTVDKSRWQQGNVFSCSVMHEALHNHYTQKSLSLSPG

SEQ ID NO: 283 - protein, 327 aa, synthetic construct
  REGION 1..327: note = _
EIQLTQSPSSLSASVGDRVTITCRASSSVSYIHWFQQKPGSAPKSLIYATSNLASGVPSRFSGSGSGTDYTLTISSLQPEDFATYYCQQWTSNPPTFGCGTKLEIKASTRKAGGDIQLTQSPSSLSASVGDRVTITCRASQSISYLNWYQQKPGKSPKRWIYDTSKLASGVPSRFSGSGSGTDYTLTISSMQPEDAATYYCQQWSSNPLTFGGGTKVEIKRTVAAPSVFIFPPSDEQLKSGTASVVCLLNNFYPREAKVQWKVDNALQSGNSQESVTEQDSKDSTYSLSSTLTLSKADYEKHKVYACEVTHQGLSSPVTKSFNRGEC

SEQ ID NO: 284 - protein, 577 aa, synthetic construct
  REGION 1..577: note = _
QVQLVQPGAEVKKPGASVKMSCKASGYTFTSYNMHWVRQAPGRCLEWMGAIYPGSGDTSYSQKFQGKVTLTADKSTSTAYMELSSLESEDTAVYYCARSTYYGGDWYFNVWGAGTTVTVSAASTRKAGGQVQLVQSGAEVAKPGASVKVSCKASGYTFTRYTMHWVKQAPGQGLEWIGYINPSRGYTNYAQKFQGKATLTTDKSTSTAYMELSSLRSEDTAVYYCARYYDDHYSLDYWGQGTTLTVSSASTKGPSVFPLAPSSKSTSGGTAALGCLVKDYFPEPVTVSWNSGALTSGVHTFPAVLQSSGLYSLSSVVTVPSSSLGTQTYICNVNHKPSNTKVDKKVEPKSCDKTHTCPPCPAPELLGGPSVFLFPPKPKDTLMISRTPEVTCVVVDVSHEDPEVKFNWYVDGVEVHNAKTKPREEQYNSTYRVVSVLTVLHQDWLNGKEYKCKVSNKALPAPIEKTISKAKGQPREPQVCTLPPSRDELTKNQVSLSCAVKGFYPSDIAVEWESNGQPENNYKTTPPVLDSDGSFFLVSKLTVDKSRWQQGNVFSCSVMHEALHNHYTQKSLSLSPG

SEQ ID NO: 285 - protein, 577 aa, synthetic construct
  REGION 1..577: note = _
QVQLVQPGAEVKKPGASVKMSCKASGYTFTSYNMHWVRQAPGRCLEWMGAIYPGSGDTSYSQKFQGKVTLTADKSTSTAYMELSSLESEDTAVYYCARSTYYGGDWYFNVWGAGTTVTVSAASTRKAGGQVQLVQSGAEVAKPGASVKVSCKASGYTFTRYTMHWVKQAPGQGLEWIGYINPSRGYTNYAQKFQGKATLTTDKSTSTAYMELSSLRSEDTAVYYCARYYDDHYSLDYWGQGTTLTVSSASTKGPSVFPLAPSSKSTSGGTAALGCLVKDYFPEPVTVSWNSGALTSGVHTFPAVLQSSGLYSLSSVVTVPSSSLGTQTYICNVNHKPSNTKVDKKVEPKSCDKTHTCPPCPAPELLGGPSVFLFPPKPKDTLMISRTPEVTCVVVDVSHEDPEVKFNWYVDGVEVHNAKTKPREEQYNSTYRVVSVLTVLHQDWLNGKEYKCKVSNKALPAPIEKTISKAKGQPREPQVYTLPPSRDELTKNQVSLTCLVKGFYPSDIAVEWESNGQPENNYKTTPPVLDSDGSFFLYSKLTVDKSRWQQGNVFSCSVMHEALHNHYTQKSLSLSPG

SEQ ID NO: 286 - protein, 324 aa, synthetic construct
  REGION 1..324: note = _
EIQLTQSPSSLSASVGDRVTITCRASSSVSYIHWFQQKPGSAPKSLIYATSNLASGVPSRFSGSGSGTDYTLTISSLQPEDFATYYCQQWTSNPPTFGGGTKLEIKGGSGSDIQLTQSPSSLSASVGDRVTITCRASQSISYLNWYQQKPGKSPKRWIYDTSKLASGVPSRFSGSGSGTDYTLTISSMQPEDAATYYCQQWSSNPLTFGGGTKVEIKRTVAAPSVFIFPPSDEQLKSGTASVVCLLNNFYPREAKVQWKVDNALQSGNSQESVTEQDSKDSTYSLSSTLTLSKADYEKHKVYACEVTHQGLSSPVTKSFNRGEC

SEQ ID NO: 287 - protein, 574 aa, synthetic construct
  REGION 1..574: note = _
QVQLVQPGAEVKKPGASVKMSCKASGYTFTSYNMHWVRQAPGRGLEWMGAIYPGSGDTSYSQKFQGKVTLTADKSTSTAYMELSSLESEDTAVYYCARSTYYGGDWYFNVWGAGTTVTVSAGGSGSQVQLVQSGAEVAKPGASVKVSCKASGYTFTRYTMHWVKQAPGQGLEWIGYINPSRGYTNYAQKFQGKATLTTDKSTSTAYMELSSLRSEDTAVYYCARYYDDHYSLDYWGQGTTLTVSSASTKGPSVFPLAPSSKSTSGGTAALGCLVKDYFPEPVTVSWNSGALTSGVHTFPAVLQSSGLYSLSSVVTVPSSSLGTQTYICNVNHKPSNTKVDKKVEPKSCDKTHTCPPCPAPELLGGPSVFLFPPKPKDTLMISRTPEVTCVVVDVSHEDPEVKFNWYVDGVEVHNAKTKPREEQYNSTYRVVSVLTVLHQDWLNGKEYKCKVSNKALPAPIEKTISKAKGQPREPQVCTLPPSRDELTKNQVSLSCAVKGFYPSDIAVEWESNGQPENNYKTTPPVLDSDGSFFLVSKLTVDKSRWQQGNVFSCSVMHEALHNHYTQKSLSLSPG

SEQ ID NO: 288 - protein, 574 aa, synthetic construct
  REGION 1..574: note = _
QVQLVQPGAEVKKPGASVKMSCKASGYTFTSYNMHWVRQAPGRGLEWMGAIYPGSGDTSYSQKFQGKVTLTADKSTSTAYMELSSLESEDTAVYYCARSTYYGGDWYFNVWGAGTTVTVSAGGSGSQVQLVQSGAEVAKPGASVKVSCKASGYTFTRYTMHWVKQAPGQGLEWIGYINPSRGYTNYAQKFQGKATLTTDKSTSTAYMELSSLRSEDTAVYYCARYYDDHYSLDYWGQGTTLTVSSASTKGPSVFPLAPSSKSTSGGTAALGCLVKDYFPEPVTVSWNSGALTSGVHTFPAVLQSSGLYSLSSVVTVPSSSLGTQTYICNVNHKPSNTKVDKKVEPKSCDKTHTCPPCPAPELLGGPSVFLFPPKPKDTLMISRTPEVTCVVVDVSHEDPEVKFNWYVDGVEVHNAKTKPREEQYNSTYRVVSVLTVLHQDWLNGKEYKCKVSNKALPAPIEKTISKAKGQPREPQVYTLPPSRDELTKNQVSLTCLVKGFYPSDIAVEWESNGQPENNYKTTPPVLDSDGSFFLYSKLTVDKSRWQQGNVFSCSVMHEALHNHYTQKSLSLSPG

SEQ ID NO: 289 - protein, 479 aa, synthetic construct
  REGION 1..479: note = _
EIQLTQSPSSLSASVGDRVTITCRASSSVSYIHWFQQKPGSAPKSLIYATSNLASGVPSRFSGSGSGTDYTLTISSLQPEDFATYYCQQWTSNPPTFGGGTKLEIKGGGGSGGSGSGGGGSASGSGQVQLVQPGAEVKKPGASVKMSCKASGYTFTSYNMHWVRQAPGRGLEWMGAIYPGSGDTSYSQKFQGKVTLTADKSTSTAYMELSSLESEDTAVYYCARSTYYGGDWYFNVWGAGTTVTVSAASGGSGDKTHTCPPCPAPELLGGPSVFLFPPKPKDTLMISRTPEVTCVVVDVSHEDPEVKFNWYVDGVEVHNAKTKPREEQYNSTYRVVSVLTVLHQDWLNGKEYKCKVSNKALPAPIEKTISKAKGQPREPQVYTLPPCRDELTKNQVSLWCLVKGFYPSDIAVEWESNGQPENNYKTTPPVLDSDGSFFLYSKLTVDKSRWQQGNVFSCSVMHEALHNHYTQKSLSLSPG

SEQ ID NO: 290 - protein, 716 aa, synthetic construct
  REGION 1..716: note = _
EIQLTQSPSSLSASVGDRVTITCRASSSVSYIHWFQQKPGSAPKSLIYATSNLASGVPSRFSGSGSGTDYTLTISSLQPEDFATYYCQQWTSNPPTFGGGTKLEIKGGSSGEIQLTQSPSSLSASVGDRVTITCRASSSVSYIHWFQQKPGSAPKSLIYATSNLASGVPSRFSGSGSGTDYTLTISSLQPEDFATYYCQQWTSNPPTFGGGTKLEIKGGGGSGGSGSGGGGSASGSGQVQLVQPGAEVKKPGASVKMSCKASGYTFTSYNMHWVRQAPGRGLEWMGAIYPGSGDTSYSQKFQGKVTLTADKSTSTAYMELSSLESEDTAVYYCARSTYYGGDWYFNVWGAGTTVTVSAGGSSGQVQLVQPGAEVKKPGASVKMSCKASGYTFTSYNMHWVRQAPGRGLEWMGAIYPGSGDTSYSQKFQGKVTLTADKSTSTAYMELSSLESEDTAVYYCARSTYYGGDWYFNVWGAGTTVTVSAASGGSGDKTHTCPPCPAPELLGGPSVFLFPPKPKDTLMISRTPEVTCVVVDVSHEDPEVKFNWYVDGVEVHNAKTKPREEQYNSTYRVVSVLTVLHQDWLNGKEYKCKVSNKALPAPIEKTISKAKGQPREPQVYTLPPCRDELTKNQVSLWCLVKGFYPSDIAVEWESNGQPENNYKTTPPVLDSDGSFFLYSKLTVDKSRWQQGNVFSCSVMHEALHNHYTQKSLSLSPG

SEQ ID NO: 291 - protein, 724 aa, synthetic construct
  REGION 1..724: note = _
EIQLTQSPSSLSASVGDRVTITCRASSSVSYIHWFQQKPGSAPKSLIYATSNLASGVPSRFSGSGSGTDYTLTISSLQPEDFATYYCQQWTSNPPTFGGGTKLEIKGGSSGDIQLTQSPSFLSASVGDRVTITCKASQSVDYSGDSYLNWYQQKPGKAPKLLIYDASNLVSGVPSRFSGSGSGTEFTLTISSLQPEDFATYYCQQSTENPWTFGGGTKLEIKGGGGSGGSGSGGGGSASGSGQVQLVQSGAEVKKPGSSVKVSCKASGYAFSSYWMNWVRQAPGQGLEWMGQIWPGDSDTNYAQKFQGRVTITADESTSTAYMELSSLRSEDTAVYYCARRETTTVGRYYYAMDYWGQGTTVTVSSGGSSGQVQLVQPGAEVKKPGASVKMSCKASGYTFTSYNMHWVRQAPGRGLEWMGAIYPGSGDTSYSQKFQGKVTLTADKSTSTAYMELSSLESEDTAVYYCARSTYYGGDWYFNVWGAGTTVTVSAASGGSGDKTHTCPPCPAPELLGGPSVFLFPPKPKDTLMISRTPEVTCVVVDVSHEDPEVKFNWYVDGVEVHNAKTKPREEQYNSTYRVVSVLTVLHQDWLNGKEYKCKVSNKALPAPIEKTISKAKGQPREPQVYTLPPCRDELTKNQVSLWCLVKGFYPSDIAVEWESNGQPENNYKTTPPVLDSDGSFFLYSKLTVDKSRWQQGNVFSCSVMHEALHNHYTQKSLSLSPG

SEQ ID NO: 292 - protein, 724 aa, synthetic construct
  REGION 1..724: note = _
DIQLTQSPSFLSASVGDRVTITCKASQSVDYSGDSYLNWYQQKPGKAPKLLIYDASNLVSGVPSRFSGSGSGTEFTLTISSLQPEDFATYYCQQSTENPWTFGGGTKLEIKGGSSGEIQLTQSPSSLSASVGDRVTITCRASSSVSYIHWFQQKPGSAPKSLIYATSNLASGVPSRFSGSGSGTDYTLTISSLQPEDFATYYCQQWTSNPPTFGGGTKLEIKGGGGSGGSGSGGGGSASGSGQVQLVQPGAEVKKPGASVKMSCKASGYTFTSYNMHWVRQAPGRGLEWMGAIYPGSGDTSYSQKFQGKVTLTADKSTSTAYMELSSLESEDTAVYYCARSTYYGGDWYFNVWGAGTTVTVSAGGSSGQVQLVQSGAEVKKPGSSVKVSCKASGYAFSSYWMNWVRQAPGQGLEWMGQIWPGDSDTNYAQKFQGRVTITADESTSTAYMELSSLRSEDTAVYYCARRETTTVGRYYYAMDYWGQGTTVTVSSASGGSGDKTHTCPPCPAPELLGGPSVFLFPPKPKDTLMISRTPEVTCVVVDVSHEDPEVKFNWYVDGVEVHNAKTKPREEQYNSTYRVVSVLTVLHQDWLNGKEYKCKVSNKALPAPIEKTISKAKGQPREPQVYTLPPCRDELTKNQVSLWCLVKGFYPSDIAVEWESNGQPENNYKTTPPVLDSDGSFFLYSKLTVDKSRWQQGNVFSCSVMHEALHNHYTQKSLSLSPG

SEQ ID NO: 293 - protein, 327 aa, synthetic construct
  REGION 1..327: note = _
EIQLTQSPSSLSASVGDRVTITCRASSSVSYIHWFQQKPGSAPKSLIYATSNLASGVPSRFSGSGSGTDYTLTISSLQPEDFATYYCQQWTSNPPTFGGGTKLEIKASTRKAGGDIQLTQSPSSLSASVGDRVTITCRASQSISYLNWYQQKPGKSPKRWIYDTSKLASGVPSRFSGSGSGTDYTLTISSMQPEDAATYYCQQWSSNPLTFGGGTKVEIKRTVAAPSVFIFPPSDEQLKSGTASVVCLLNNFYPREAKVQWKVDNALQSGNSQESVTEQDSKDSTYSLSSTLTLSKADYEKHKVYACEVTHQGLSSPVTKSFNRGEC

SEQ ID NO: 294 - protein, 324 aa, synthetic construct
  REGION 1..324: note = _
EIQLTQSPSSLSASVGDRVTITCRASSSVSYIHWFQQKPGSAPKSLIYATSNLASGVPSRFSGSGSGTDYTLTISSLQPEDFATYYCQQWTSNPPTFGCGTKLEIKGGSGSDIQLTQSPSSLSASVGDRVTITCRASQSISYLNWYQQKPGKSPKRWIYDTSKLASGVPSRFSGSGSGTDYTLTISSMQPEDAATYYCQQWSSNPLTFGGGTKVEIKRTVAAPSVFIFPPSDEQLKSGTASVVCLLNNFYPREAKVQWKVDNALQSGNSQESVTEQDSKDSTYSLSSTLTLSKADYEKHKVYACEVTHQGLSSPVTKSFNRGEC

SEQ ID NO: 295 - protein, 577 aa, synthetic construct
  REGION 1..577: note = _
QVQLVQPGAEVKKPGASVKMSCKASGYTFTSYNMHWVRQAPGRGLEWMGAIYPGNGDTSYNQKFQGRVTLTADKSTSTAYMELSSLESEDTAVYYCARSTYYGGDWYFNVWGAGTTVTVSAASTRKAGGQVQLVQSGAEVAKPGASVKVSCKASGYTFTRYTMHWVKQAPGQGLEWIGYINPSRGYTNYAQKFQGKATLTTDKSTSTAYMELSSLRSEDTAVYYCARYYDDHYSLDYWGQGTTLTVSSASTKGPSVFPLAPSSKSTSGGTAALGCLVKDYFPEPVTVSWNSGALTSGVHTFPAVLQSSGLYSLSSVVTVPSSSLGTQTYICNVNHKPSNTKVDKKVEPKSCDKTHTCPPCPAPELLGGPSVFLFPPKPKDTLMISRTPEVTCVVVDVSHEDPEVKFNWYVDGVEVHNAKTKPREEQYNSTYRVVSVLTVLHQDWLNGKEYKCKVSNKALPAPIEKTISKAKGQPREPQVCTLPPSRDELTKNQVSLSCAVKGFYPSDIAVEWESNGQPENNYKTTPPVLDSDGSFFLVSKLTVDKSRWQQGNVFSCSVMHEALHNHYTQKSLSLSPG

SEQ ID NO: 296 - protein, 577 aa, synthetic construct
  REGION 1..577: note = _
QVQLVQPGAEVKKPGASVKMSCKASGYTFTSYNMHWVRQAPGRGLEWMGAIYPGNGDTSYNQKFQGRVTLTADKSTSTAYMELSSLESEDTAVYYCARSTYYGGDWYFNVWGAGTTVTVSAASTRKAGGQVQLVQSGAEVAKPGASVKVSCKASGYTFTRYTMHWVKQAPGQGLEWIGYINPSRGYTNYAQKFQGKATLTTDKSTSTAYMELSSLRSEDTAVYYCARYYDDHYSLDYWGQGTTLTVSSASTKGPSVFPLAPSSKSTSGGTAALGCLVKDYFPEPVTVSWNSGALTSGVHTFPAVLQSSGLYSLSSVVTVPSSSLGTQTYICNVNHKPSNTKVDKKVEPKSCDKTHTCPPCPAPEAAGGPSVFLFPPKPKDTLMISRTPEVTCVVVDVSHEDPEVKFNWYVDGVEVHNAKTKPREEQYNSTYRVVSVLTVLHQDWLNGKEYKCKVSNKALAAPIEKTISKAKGQPREPQVCTLPPSRDELTKNQVSLSCAVKGFYPSDIAVEWESNGQPENNYKTTPPVLDSDGSFFLVSKLTVDKSRWQQGNVFSCSVMHEALHNHYTQKSLSLSPG

SEQ ID NO: 297 - protein, 577 aa, synthetic construct
  REGION 1..577: note = _
QVQLVQPGAEVKKPGASVKMSCKASGYTFTSYNMHWVRQAPGRCLEWMGAIYPGNGDTSYNQKFQGRVTLTADKSTSTAYMELSSLESEDTAVYYCARSTYYGGDWYFNVWGAGTTVTVSAASTRKAGGQVQLVQSGAEVAKPGASVKVSCKASGYTFTRYTMHWVKQAPGQGLEWIGYINPSRGYTNYAQKFQGKATLTTDKSTSTAYMELSSLRSEDTAVYYCARYYDDHYSLDYWGQGTTLTVSSASTKGPSVFPLAPSSKSTSGGTAALGCLVKDYFPEPVTVSWNSGALTSGVHTFPAVLQSSGLYSLSSVVTVPSSSLGTQTYICNVNHKPSNTKVDKKVEPKSCDKTHTCPPCPAPELLGGPSVFLFPPKPKDTLMISRTPEVTCVVVDVSHEDPEVKFNWYVDGVEVHNAKTKPREEQYNSTYRVVSVLTVLHQDWLNGKEYKCKVSNKALPAPIEKTISKAKGQPREPQVCTLPPSRDELTKNQVSLSCAVKGFYPSDIAVEWESNGQPENNYKTTPPVLDSDGSFFLVSKLTVDKSRWQQGNVFSCSVMHEALHNHYTQKSLSLSPG

SEQ ID NO: 298 - protein, 577 aa, synthetic construct
  REGION 1..577: note = _
QVQLVQPGAEVKKPGASVKMSCKASGYTFTSYNMHWVRQAPGRCLEWMGAIYPGNGDTSYNQKFQGRVTLTADKSTSTAYMELSSLESEDTAVYYCARSTYYGGDWYFNVWGAGTTVTVSAASTRKAGGQVQLVQSGAEVAKPGASVKVSCKASGYTFTRYTMHWVKQAPGQGLEWIGYINPSRGYTNYAQKFQGKATLTTDKSTSTAYMELSSLRSEDTAVYYCARYYDDHYSLDYWGQGTTLTVSSASTKGPSVFPLAPSSKSTSGGTAALGCLVKDYFPEPVTVSWNSGALTSGVHTFPAVLQSSGLYSLSSVVTVPSSSLGTQTYICNVNHKPSNTKVDKKVEPKSCDKTHTCPPCPAPEAAGGPSVFLFPPKPKDTLMISRTPEVTCVVVDVSHEDPEVKFNWYVDGVEVHNAKTKPREEQYNSTYRVVSVLTVLHQDWLNGKEYKCKVSNKALAAPIEKTISKAKGQPREPQVCTLPPSRDELTKNQVSLSCAVKGFYPSDIAVEWESNGQPENNYKTTPPVLDSDGSFFLVSKLTVDKSRWQQGNVFSCSVMHEALHNHYTQKSLSLSPG

SEQ ID NO: 299 - protein, 574 aa, synthetic construct
  REGION 1..574: note = _
QVQLVQPGAEVKKPGASVKMSCKASGYTFTSYNMHWVRQAPGRGLEWMGAIYPGNGDTSYNQKFQGRVTLTADKSTSTAYMELSSLESEDTAVYYCARSTYYGGDWYFNVWGAGTTVTVSAGGSGSQVQLVQSGAEVAKPGASVKVSCKASGYTFTRYTMHWVKQAPGQGLEWIGYINPSRGYTNYAQKFQGKATLTTDKSTSTAYMELSSLRSEDTAVYYCARYYDDHYSLDYWGQGTTLTVSSASTKGPSVFPLAPSSKSTSGGTAALGCLVKDYFPEPVTVSWNSGALTSGVHTFPAVLQSSGLYSLSSVVTVPSSSLGTQTYICNVNHKPSNTKVDKKVEPKSCDKTHTCPPCPAPELLGGPSVFLFPPKPKDTLMISRTPEVTCVVVDVSHEDPEVKFNWYVDGVEVHNAKTKPREEQYNSTYRVVSVLTVLHQDWLNGKEYKCKVSNKALPAPIEKTISKAKGQPREPQVCTLPPSRDELTKNQVSLSCAVKGFYPSDIAVEWESNGQPENNYKTTPPVLDSDGSFFLVSKLTVDKSRWQQGNVFSCSVMHEALHNHYTQKSLSLSPG

SEQ ID NO: 300 - protein, 574 aa, synthetic construct
  REGION 1..574: note = _
QVQLVQPGAEVKKPGASVKMSCKASGYTFTSYNMHWVRQAPGRGLEWMGAIYPGNGDTSYNQKFQGRVTLTADKSTSTAYMELSSLESEDTAVYYCARSTYYGGDWYFNVWGAGTTVTVSAGGSGSQVQLVQSGAEVAKPGASVKVSCKASGYTFTRYTMHWVKQAPGQGLEWIGYINPSRGYTNYAQKFQGKATLTTDKSTSTAYMELSSLRSEDTAVYYCARYYDDHYSLDYWGQGTTLTVSSASTKGPSVFPLAPSSKSTSGGTAALGCLVKDYFPEPVTVSWNSGALTSGVHTFPAVLQSSGLYSLSSVVTVPSSSLGTQTYICNVNHKPSNTKVDKKVEPKSCDKTHTCPPCPAPEAAGGPSVFLFPPKPKDTLMISRTPEVTCVVVDVSHEDPEVKFNWYVDGVEVHNAKTKPREEQYNSTYRVVSVLTVLHQDWLNGKEYKCKVSNKALAAPIEKTISKAKGQPREPQVCTLPPSRDELTKNQVSLSCAVKGFYPSDIAVEWESNGQPENNYKTTPPVLDSDGSFFLVSKLTVDKSRWQQGNVFSCSVMHEALHNHYTQKSLSLSPG

SEQ ID NO: 301 - protein, 332 aa, synthetic construct
  REGION 1..332: note = _
DIQLTQSPSFLSASVGDRVTITCKASQSVDYSGDSYLNWYQQKPGKAPKLLIYDASNLVSGVPSRFSGSGSGTEFTLTISSLQPEDFATYYCQQSTENPWTFGCGTKLEIKASTRKAGGDIQLTQSPSSLSASVGDRVTITCRASQSISYLNWYQQKPGKSPKRWIYDTSKLASGVPSRFSGSGSGTDYTLTISSMQPEDAATYYCQQWSSNPLTFGGGTKVEIKRTVAAPSVFIFPPSDEQLKSGTASVVCLLNNFYPREAKVQWKVDNALQSGNSQESVTEQDSKDSTYSLSSTLTLSKADYEKHKVYACEVTHQGLSSPVTKSFNRGEC

SEQ ID NO: 302 - protein, 332 aa, synthetic construct
  REGION 1..332: note = _
DIQLTQSPSFLSASVGDRVTITCKASQSVDYSGDSYLNWYQQKPGKAPKLLIYDASNLVSGVPSRFSGSGSGTEFTLTISSLQPEDFATYYCQQSTENPWTFGGGTKLEIKASTRKAGGDIQLTQSPSSLSASVGDRVTITCRASQSISYLNWYQQKPGKSPKRWIYDTSKLASGVPSRFSGSGSGTDYTLTISSMQPEDAATYYCQQWSSNPLTFGGGTKVEIKRTVAAPSVFIFPPSDEQLKSGTASVVCLLNNFYPREAKVQWKVDNALQSGNSQESVTEQDSKDSTYSLSSTLTLSKADYEKHKVYACEVTHQGLSSPVTKSFNRGEC

SEQ ID NO: 303 - protein, 580 aa, synthetic construct
  REGION 1..580: note = _
QVQLVQSGAEVKKPGSSVKVSCKASGYAFSSYWMNWVRQAPGQGLEWMGQIWPGDSDTNYAQKFQGRVTITADESTSTAYMELSSLRSEDTAVYYCARRETTTVGRYYYAMDYWGQGTTVTVSSASTRKAGGQVQLVQSGAEVAKPGASVKVSCKASGYTFTRYTMHWVKQAPGQGLEWIGYINPSRGYTNYAQKFQGKATLTTDKSTSTAYMELSSLRSEDTAVYYCARYYDDHYSLDYWGQGTTLTVSSASTKGPSVFPLAPSSKSTSGGTAALGCLVKDYFPEPVTVSWNSGALTSGVHTFPAVLQSSGLYSLSSVVTVPSSSLGTQTYICNVNHKPSNTKVDKKVEPKSCDKTHTCPPCPAPELLGGPSVFLFPPKPKDTLMISRTPEVTCVVVDVSHEDPEVKFNWYVDGVEVHNAKTKPREEQYNSTYRVVSVLTVLHQDWLNGKEYKCKVSNKALPAPIEKTISKAKGQPREPQVCTLPPSRDELTKNQVSLSCAVKGFYPSDIAVEWESNGQPENNYKTTPPVLDSDGSFFLVSKLTVDKSRWQQGNVFSCSVMHEALHNHYTQKSLSLSPG

SEQ ID NO: 304 - protein, 580 aa, synthetic construct
  REGION 1..580: note = _
QVQLVQSGAEVKKPGSSVKVSCKASGYAFSSYWMNWVRQAPGQGLEWMGQIWPGDSDTNYAQKFQGRVTITADESTSTAYMELSSLRSEDTAVYYCARRETTTVGRYYYAMDYWGQGTTVTVSSASTRKAGGQVQLVQSGAEVAKPGASVKVSCKASGYTFTRYTMHWVKQAPGQGLEWIGYINPSRGYTNYAQKFQGKATLTTDKSTSTAYMELSSLRSEDTAVYYCARYYDDHYSLDYWGQGTTLTVSSASTKGPSVFPLAPSSKSTSGGTAALGCLVKDYFPEPVTVSWNSGALTSGVHTFPAVLQSSGLYSLSSVVTVPSSSLGTQTYICNVNHKPSNTKVDKKVEPKSCDKTHTCPPCPAPEAAGGPSVFLFPPKPKDTLMISRTPEVTCVVVDVSHEDPEVKFNWYVDGVEVHNAKTKPREEQYNSTYRVVSVLTVLHQDWLNGKEYKCKVSNKALAAPIEKTISKAKGQPREPQVCTLPPSRDELTKNQVSLSCAVKGFYPSDIAVEWESNGQPENNYKTTPPVLDSDGSFFLVSKLTVDKSRWQQGNVFSCSVMHEALHNHYTQKSLSLSPG

SEQ ID NO: 305 - protein, 580 aa, synthetic construct
  REGION 1..580: note = _
QVQLVQSGAEVKKPGSSVKVSCKASGYAFSSYWMNWVRQAPGQCLEWMGQIWPGDSDTNYAQKFQGRVTITADESTSTAYMELSSLRSEDTAVYYCARRETTTVGRYYYAMDYWGQGTTVTVSSASTRKAGGQVQLVQSGAEVAKPGASVKVSCKASGYTFTRYTMHWVKQAPGQGLEWIGYINPSRGYTNYAQKFQGKATLTTDKSTSTAYMELSSLRSEDTAVYYCARYYDDHYSLDYWGQGTTLTVSSASTKGPSVFPLAPSSKSTSGGTAALGCLVKDYFPEPVTVSWNSGALTSGVHTFPAVLQSSGLYSLSSVVTVPSSSLGTQTYICNVNHKPSNTKVDKKVEPKSCDKTHTCPPCPAPELLGGPSVFLFPPKPKDTLMISRTPEVTCVVVDVSHEDPEVKFNWYVDGVEVHNAKTKPREEQYNSTYRVVSVLTVLHQDWLNGKEYKCKVSNKALPAPIEKTISKAKGQPREPQVCTLPPSRDELTKNQVSLSCAVKGFYPSDIAVEWESNGQPENNYKTTPPVLDSDGSFFLVSKLTVDKSRWQQGNVFSCSVMHEALHNHYTQKSLSLSPG

SEQ ID NO: 306 - protein, 580 aa, synthetic construct
  REGION 1..580: note = _
QVQLVQSGAEVKKPGSSVKVSCKASGYAFSSYWMNWVRQAPGQCLEWMGQIWPGDSDTNYAQKFQGRVTITADESTSTAYMELSSLRSEDTAVYYCARRETTTVGRYYYAMDYWGQGTTVTVSSASTRKAGGQVQLVQSGAEVAKPGASVKVSCKASGYTFTRYTMHWVKQAPGQGLEWIGYINPSRGYTNYAQKFQGKATLTTDKSTSTAYMELSSLRSEDTAVYYCARYYDDHYSLDYWGQGTTLTVSSASTKGPSVFPLAPSSKSTSGGTAALGCLVKDYFPEPVTVSWNSGALTSGVHTFPAVLQSSGLYSLSSVVTVPSSSLGTQTYICNVNHKPSNTKVDKKVEPKSCDKTHTCPPCPAPEAAGGPSVFLFPPKPKDTLMISRTPEVTCVVVDVSHEDPEVKFNWYVDGVEVHNAKTKPREEQYNSTYRVVSVLTVLHQDWLNGKEYKCKVSNKALAAPIEKTISKAKGQPREPQVCTLPPSRDELTKNQVSLSCAVKGFYPSDIAVEWESNGQPENNYKTTPPVLDSDGSFFLVSKLTVDKSRWQQGNVFSCSVMHEALHNHYTQKSLSLSPG

SEQ ID NO: 307 - protein, 329 aa, synthetic construct
  REGION 1..329: note = _
DIQLTQSPSFLSASVGDRVTITCKASQSVDYSGDSYLNWYQQKPGKAPKLLIYDASNLVSGVPSRFSGSGSGTEFTLTISSLQPEDFATYYCQQSTENPWTFGGGTKLEIKGGSGSDIQLTQSPSSLSASVGDRVTITCRASQSISYLNWYQQKPGKSPKRWIYDTSKLASGVPSRFSGSGSGTDYTLTISSMQPEDAATYYCQQWSSNPLTFGGGTKVEIKRTVAAPSVFIFPPSDEQLKSGTASVVCLLNNFYPREAKVQWKVDNALQSGNSQESVTEQDSKDSTYSLSSTLTLSKADYEKHKVYACEVTHQGLSSPVTKSFNRGEC

SEQ ID NO: 308 - protein, 329 aa, synthetic construct
  REGION 1..329: note = _
DIQLTQSPSFLSASVGDRVTITCKASQSVDYSGDSYLNWYQQKPGKAPKLLIYDASNLVSGVPSRFSGSGSGTEFTLTISSLQPEDFATYYCQQSTENPWTFGCGTKLEIKGGSGSDIQLTQSPSSLSASVGDRVTITCRASQSISYLNWYQQKPGKSPKRWIYDTSKLASGVPSRFSGSGSGTDYTLTISSMQPEDAATYYCQQWSSNPLTFGGGTKVEIKRTVAAPSVFIFPPSDEQLKSGTASVVCLLNNFYPREAKVQWKVDNALQSGNSQESVTEQDSKDSTYSLSSTLTLSKADYEKHKVYACEVTHQGLSSPVTKSFNRGEC

SEQ ID NO: 309 - protein, 577 aa, synthetic construct
  REGION 1..577: note = _
QVQLVQSGAEVKKPGSSVKVSCKASGYAFSSYWMNWVRQAPGQGLEWMGQIWPGDSDTNYAQKFQGRVTITADESTSTAYMELSSLRSEDTAVYYCARRETTTVGRYYYAMDYWGQGTTVTVSSGGSGSQVQLVQSGAEVAKPGASVKVSCKASGYTFTRYTMHWVKQAPGQGLEWIGYINPSRGYTNYAQKFQGKATLTTDKSTSTAYMELSSLRSEDTAVYYCARYYDDHYSLDYWGQGTTLTVSSASTKGPSVFPLAPSSKSTSGGTAALGCLVKDYFPEPVTVSWNSGALTSGVHTFPAVLQSSGLYSLSSVVTVPSSSLGTQTYICNVNHKPSNTKVDKKVEPKSCDKTHTCPPCPAPEAAGGPSVFLFPPKPKDTLMISRTPEVTCVVVDVSHEDPEVKFNWYVDGVEVHNAKTKPREEQYNSTYRVVSVLTVLHQDWLNGKEYKCKVSNKALAAPIEKTISKAKGQPREPQVCTLPPSRDELTKNQVSLSCAVKGFYPSDIAVEWESNGQPENNYKTTPPVLDSDGSFFLVSKLTVDKSRWQQGNVFSCSVMHEALHNHYTQKSLSLSPG

SEQ ID NO: 310 - protein, 724 aa, synthetic construct
  REGION 1..724: note = _
DIQLTQSPSFLSASVGDRVTITCKASQSVDYSGDSYLNWYQQKPGKAPKLLIYDASNLVSGVPSRFSGSGSGTEFTLTISSLQPEDFATYYCQQSTENPWTFGGGTKLEIKGGSSGDIQMTQSPSSLSASVGDRVTITCHASQNIYVWLNWYQQKPGKAPKLLIYKASNLHTGVPSRFSGSGSGTDFTLTISSLQPEDFATYYCQQGQTYPYTFGGGTKVEIKGGGGSGGSGSGGGGSASGSGQVQLVQSGAEVKKPGASVKVSCKASGYTFTSYYIHWVRQAPGQGLEWIGSIYPGNVNTNYNEKFKDRATLTVDTSISTAYMELSRLRSDDTAVYFCTRSHYGLDWNFDVWGQGTTVTVSSGGSSGQVQLVQSGAEVKKPGSSVKVSCKASGYAFSSYWMNWVRQAPGQGLEWMGQIWPGDSDTNYAQKFQGRVTITADESTSTAYMELSSLRSEDTAVYYCARRETTTVGRYYYAMDYWGQGTTVTVSSASGGSGDKTHTCPPCPAPEAAGGPSVFLFPPKPKDTLMISRTPEVTCVVVDVSHEDPEVKFNWYVDGVEVHNAKTKPREEQYNSTYRVVSVLTVLHQDWLNGKEYKCKVSNKALAAPIEKTISKAKGQPREPQVYTLPPCRDELTKNQVSLWCLVKGFYPSDIAVEWESNGQPENNYKTTPPVLDSDGSFFLYSKLTVDKSRWQQGNVFSCSVMHEALHNHYTQKSLSLSPG

SEQ ID NO: 311 - protein, 724 aa, synthetic construct
  REGION 1..724: note = _
DIQLTQSPSFLSASVGDRVTITCKASQSVDYSGDSYLNWYQQKPGKAPKLLIYDASNLVSGVPSRFSGSGSGTEFTLTISSLQPEDFATYYCQQSTENPWTFGGGTKLEIKGGSSGDIQMTQSPSSLSASVGDRVTITCHASQNIYVWLNWYQQKPGKAPKLLIYKASNLHTGVPSRFSGSGSGTDFTLTISSLQPEDFATYYCQQGQTYPYTFGGGTKVEIKGGGGSGGSGSGGGGSASGSGQVQLVQSGAEVKKPGASVKVSCKASGYTFTSYYIHWVRQAPGQGLEWIGSIYPGNVNTNYNEKFKDRATLTVDTSISTAYMELSRLRSDDTAVYFCTRSHYGLDWNFDVWGQGTTVTVSSGGSSGQVQLVQSGAEVKKPGSSVKVSCKASGYAFSSYWMNWVRQAPGQGLEWMGQIWPGDSDTNYAQKFQGRVTITADESTSTAYMELSSLRSEDTAVYYCARRETTTVGRYYYAMDYWGQGTTVTVSSASGGSGDKTHTCPPCPAPELLGGPSVFLFPPKPKDTLMISRTPEVTCVVVDVSHEDPEVKFNWYVDGVEVHNAKTKPREEQYNSTYRVVSVLTVLHQDWLNGKEYKCKVSNKALPAPIEKTISKAKGQPREPQVYTLPPCRDELTKNQVSLWCLVKGFYPSDIAVEWESNGQPENNYKTTPPVLDSDGSFFLYSKLTVDKSRWQQGNVFSCSVMHEALHNHYTQKSLSLSPG

SEQ ID NO: 312 - protein, 724 aa, synthetic construct
  REGION 1..724: note = _
DIQMTQSPSSLSASVGDRVTITCHASQNIYVWLNWYQQKPGKAPKLLIYKASNLHTGVPSRFSGSGSGTDFTLTISSLQPEDFATYYCQQGQTYPYTFGGGTKVEIKGGSSGDIQLTQSPSFLSASVGDRVTITCKASQSVDYSGDSYLNWYQQKPGKAPKLLIYDASNLVSGVPSRFSGSGSGTEFTLTISSLQPEDFATYYCQQSTENPWTFGGGTKLEIKGGGGSGGSGSGGGGSASGSGQVQLVQSGAEVKKPGSSVKVSCKASGYAFSSYWMNWVRQAPGQGLEWMGQIWPGDSDTNYAQKFQGRVTITADESTSTAYMELSSLRSEDTAVYYCARRETTTVGRYYYAMDYWGQGTTVTVSSGGSSGQVQLVQSGAEVKKPGASVKVSCKASGYTFTSYYIHWVRQAPGQGLEWIGSIYPGNVNTNYNEKFKDRATLTVDTSISTAYMELSRLRSDDTAVYFCTRSHYGLDWNFDVWGQGTTVTVSSASGGSGDKTHTCPPCPAPEAAGGPSVFLFPPKPKDTLMISRTPEVTCVVVDVSHEDPEVKFNWYVDGVEVHNAKTKPREEQYNSTYRVVSVLTVLHQDWLNGKEYKCKVSNKALAAPIEKTISKAKGQPREPQVYTLPPCRDELTKNQVSLWCLVKGFYPSDIAVEWESNGQPENNYKTTPPVLDSDGSFFLYSKLTVDKSRWQQGNVFSCSVMHEALHNHYTQKSLSLSPG

SEQ ID NO: 313 - protein, 647 aa, synthetic construct
  REGION 1..647: note = _
LQPEDFATYYCQQGQTYPYTFGGGTKVEIKGGSSGDIQLTQSPSFLSASVGDRVTITCKASQSVDYSGDSYLNWYQQKPGKAPKLLIYDASNLVSGVPSRFSGSGSGTEFTLTISSLQPEDFATYYCQQSTENPWTFGGGTKLEIKGGGGSGGSGSGGGGSASGSGQVQLVQSGAEVKKPGSSVKVSCKASGYAFSSYWMNWVRQAPGQGLEWMGQIWPGDSDTNYAQKFQGRVTITADESTSTAYMELSSLRSEDTAVYYCARRETTTVGRYYYAMDYWGQGTTVTVSSGGSSGQVQLVQSGAEVKKPGASVKVSCKASGYTFTSYYIHWVRQAPGQGLEWIGSIYPGNVNTNYNEKFKDRATLTVDTSISTAYMELSRLRSDDTAVYFCTRSHYGLDWNFDVWGQGTTVTVSSASGGSGDKTHTCPPCPAPELLGGPSVFLFPPKPKDTLMISRTPEVTCVVVDVSHEDPEVKFNWYVDGVEVHNAKTKPREEQYNSTYRVVSVLTVLHQDWLNGKEYKCKVSNKALPAPIEKTISKAKGQPREPQVYTLPPCRDELTKNQVSLWCLVKGFYPSDIAVEWESNGQPENNYKTTPPVLDSDGSFFLYSKLTVDKSRWQQGNVFSCSVMHEALHNHYTQKSLSLSPG

SEQ ID NO: 314 - protein, 716 aa, synthetic construct
  REGION 1..716: note = _
DIQMTQSPSSLSASVGDRVTITCHASQNIYVWLNWYQQKPGKAPKLLIYKASNLHTGVPSRFSGSGSGTDFTLTISSLQPEDFATYYCQQGQTYPYTFGGGTKVEIKGGSSGEIQLTQSPSSLSASVGDRVTITCRASSSVSYIHWFQQKPGSAPKSLIYATSNLASGVPSRFSGSGSGTDYTLTISSLQPEDFATYYCQQWTSNPPTFGGGTKLEIKGGGGSGGSGSGGGGSASGSGQVQLVQPGAEVKKPGASVKMSCKASGYTFTSYNMHWVRQAPGRGLEWMGAIYPGNGDTSYNQKFQGRVTLTADKSTSTAYMELSSLESEDTAVYYCARSTYYGGDWYFNVWGAGTTVTVSAGGSSGQVQLVQSGAEVKKPGASVKVSCKASGYTFTSYYIHWVRQAPGQGLEWIGSIYPGNVNTNYNEKFKDRATLTVDTSISTAYMELSRLRSDDTAVYFCTRSHYGLDWNFDVWGQGTTVTVSSASGGSGDKTHTCPPCPAPELLGGPSVFLFPPKPKDTLMISRTPEVTCVVVDVSHEDPEVKFNWYVDGVEVHNAKTKPREEQYNSTYRVVSVLTVLHQDWLNGKEYKCKVSNKALPAPIEKTISKAKGQPREPQVYTLPPCRDELTKNQVSLWCLVKGFYPSDIAVEWESNGQPENNYKTTPPVLDSDGSFFLYSKLTVDKSRWQQGNVFSCSVMHEALHNHYTQKSLSLSPG

SEQ ID NO: 315 - protein, 716 aa, synthetic construct; identical to SEQ ID NO: 314
  REGION 1..716: note = _

SEQ ID NO: 316 - protein, 714 aa, synthetic construct
  REGION 1..714: note = _
DIQMTQSPSSLSASVGDRVTITCHASQNIYVWLNWYQQKPGKAPKLLIYKASNLHTGVPSRFSGSGSGTDFTLTISSLQPEDFATYYCQQGQTYPYTFGGGTKVEIKGGSSGDIQLTQSPSSLSASVGDRVTITCRASQSISYLNWYQQKPGKSPKRWIYDTSKLASGVPSRFSGSGSGTDYTLTISSMQPEDAATYYCQQWSSNPLTFGGGTKVEIKGGGGSGGSGSGGGGSASGSGQVQLVQSGAEVAKPGASVKVSCKASGYTFTRYTMHWVKQAPGQGLEWIGYINPSRGYTNYAQKFQGKATLTTDKSTSTAYMELSSLRSEDTAVYYCARYYDDHYSLDYWGQGTTLTVSSGGSSGQVQLVQSGAEVKKPGASVKVSCKASGYTFTSYYIHWVRQAPGQGLEWIGSIYPGNVNTNYNEKFKDRATLTVDTSISTAYMELSRLRSDDTAVYFCTRSHYGLDWNFDVWGQGTTVTVSSASGGSGDKTHTCPPCPAPEAAGGPSVFLFPPKPKDTLMISRTPEVTCVVVDVSHEDPEVKFNWYVDGVEVHNAKTKPREEQYNSTYRVVSVLTVLHQDWLNGKEYKCKVSNKALAAPIEKTISKAKGQPREPQVCTLPPSRDELTKNQVSLSCAVKGFYPSDIAVEWESNGQPENNYKTTPPVLDSDGSFFLVSKLTVDKSRWQQGNVFSCSVMHEALHNHYTQKSLSLSPG

SEQ ID NO: 317 - protein, 714 aa, synthetic construct
  REGION 1..714: note = _
DIQLTQSPSSLSASVGDRVTITCRASQSISYLNWYQQKPGKSPKRWIYDTSKLASGVPSRFSGSGSGTDYTLTISSMQPEDAATYYCQQWSSNPLTFGGGTKVEIKGGSSGDIQMTQSPSSLSASVGDRVTITCHASQNIYVWLNWYQQKPGKAPKLLIYKASNLHTGVPSRFSGSGSGTDFTLTISSLQPEDFATYYCQQGQTYPYTFGGGTKVEIKGGGGSGGSGSGGGGSASGSGQVQLVQSGAEVKKPGASVKVSCKASGYTFTSYYIHWVRQAPGQGLEWIGSIYPGNVNTNYNEKFKDRATLTVDTSISTAYMELSRLRSDDTAVYFCTRSHYGLDWNFDVWGQGTTVTVSSGGSSGQVQLVQSGAEVAKPGASVKVSCKASGYTFTRYTMHWVKQAPGQGLEWIGYINPSRGYTNYAQKFQGKATLTTDKSTSTAYMELSSLRSEDTAVYYCARYYDDHYSLDYWGQGTTLTVSSASGGSGDKTHTCPPCPAPEAAGGPSVFLFPPKPKDTLMISRTPEVTCVVVDVSHEDPEVKFNWYVDGVEVHNAKTKPREEQYNSTYRVVSVLTVLHQDWLNGKEYKCKVSNKALAAPIEKTISKAKGQPREPQVCTLPPSRDELTKNQVSLSCAVKGFYPSDIAVEWESNGQPENNYKTTPPVLDSDGSFFLVSKLTVDKSRWQQGNVFSCSVMHEALHNHYTQKSLSLSPG

SEQ ID NO: 318 - protein, 714 aa, synthetic construct
  REGION 1..714: note = _
DIQMTQSPSSLSASVGDRVTITCHASQNIYVWLNWYQQKPGKAPKLLIYKASNLHTGVPSRFSGSGSGTDFTLTISSLQPEDFATYYCQQGQTYPYTFGGGTKVEIKGGSSGDIQLTQSPSSLSASVGDRVTITCRASQSISYLNWYQQKPGKSPKRWIYDTSKLASGVPSRFSGSGSGTDYTLTISSMQPEDAATYYCQQWSSNPLTFGGGTKVEIKGGGGSGGSGSGGGGSASGSGQVQLVQSGAEVAKPGASVKVSCKASGYTFTRYTMHWVKQAPGQGLEWIGYINPSRGYTNYAQKFQGKATLTTDKSTSTAYMELSSLRSEDTAVYYCARYYDDHYSLDYWGQGTTLTVSSGGSSGQVQLVQSGAEVKKPGASVKVSCKASGYTFTSYYIHWVRQAPGQGLEWIGSIYPGNVNTNYNEKFKDRATLTVDTSISTAYMELSRLRSDDTAVYFCTRSHYGLDWNFDVWGQGTTVTVSSASGGSGDKTHTCPPCPAPEAAGGPSVFLFPPKPKDTLMISRTPEVTCVVVDVSHEDPEVKFNWYVDGVEVHNAKTKPREEQYNSTYRVVSVLTVLHQDWLNGKEYKCKVSNKALAAPIEKTISKAKGQPREPQVYTLPPSRDELTKNQVSLTCLVKGFYPSDIAVEWESNGQPENNYKTTPPVLDSDGSFFLYSKLTVDKSRWQQGNVFSCSVMHEALHNHYTQKSLSLSPG

SEQ ID NO: 319 - protein, 1153 aa, synthetic construct
  REGION 1..1153: note = _
DIQMTQSPSSLSASVGDRVTITCHASQNIYVWLNWYQQKPGKAPKLLIYKASNLHTGVPSRFSGSGSGTDFTLTISSLQPEDFATYYCQQGQTYPYTFGGGTKVEIKGGSSGDIQLTQSPSSLSASVGDRVTITCRASQSISYLNWYQQKPGKSPKRWIYDTSKLASGVPSRFSGSGSGTDYTLTISSMQPEDAATYYCQQWSSNPLTFGGGTKVEIKGGGGSGGSGSGGGGSASGSGQVQLVQSGAEVAKPGASVKVSCKASGYTFTRYTMHWVKQAPGQGLEWIGYINPSRGYTNYAQKFQGKATLTTDKSTSTAYMELSSLRSEDTAVYYCARYYDDHYSLDYWGQGTTLTVSSGGSSGQVQLVQSGAEVKKPGASVKVSCKASGYTFTSYYIHWVRQAPGQGLEWIGSIYPGNVNTNYNEKFKDRATLTVDTSISTAYMELSRLRSDDTAVYFCTRSHYGLDWNFDVWGQGTTVTVSSASGGSGDKTHTCPPCPAPEAAGGPSVFLFPPKPKDTLMISRTPEVTCVVVDVSHEDPEVKFNWYVDGVEVHNAKTKPREEQYNSTYRVVSVLTVLHQDWLNGKEYKCKVSNKALAAPIEKTISKAKGQPREPQVCTLPPSRDELTKNQVSLSCAVKGFYPSDIAVEWESNGQPENNYKTTPPVLDSDGSFFLVSKLTVDKSRWQQGNVFSCSVMHEALHNHYTQKSLSLSPGGGSSGSGSGGSGSSGVSHRYSRIQSIKVQFTEYKKEKGFILTSQKEDEIMKVQNNSVIINCDGFYLISLKGYFSQEVNISLHYQKDEEPLFQLKKVRSVNSLMVASLTYKDKVYLNVTTDNTSLDDFHVNGGELILIHQNPGEFCVLGGSGGSGGGSSGSGVSHRYSRIQSIKVQFTEYKKEKGFILTSQKEDEIMKVQNNSVIINCDGFYLISLKGYFSQEVNISLHYQKDEEPLFQLKKVRSVNSLMVASLTYKDKVYLNVTTDNTSLDDFHVNGGELILIHQNPGEFCVLGGSGGSGGGSSGSGVSHRYSRIQSIKVQFTEYKKEKGFILTSQKEDEIMKVQNNSVIINCDGFYLISLKGYFSQEVNISLHYQKDEEPLFQLKKVRSVNSLMVASLTYKDKVYLNVTTDNTSLDDFHVNGGELILIHQNPGEFCVL

SEQ ID NO: 320 - protein, 1153 aa, synthetic construct
  REGION 1..1153: note = _
DIQLTQSPSSLSASVGDRVTITCRASQSISYLNWYQQKPGKSPKRWIYDTSKLASGVPSRFSGSGSGTDYTLTISSMQPEDAATYYCQQWSSNPLTFGGGTKVEIKGGSSGDIQMTQSPSSLSASVGDRVTITCHASQNIYVWLNWYQQKPGKAPKLLIYKASNLHTGVPSRFSGSGSGTDFTLTISSLQPEDFATYYCQQGQTYPYTFGGGTKVEIKGGGGSGGSGSGGGGSASGSGQVQLVQSGAEVKKPGASVKVSCKASGYTFTSYYIHWVRQAPGQGLEWIGSIYPGNVNTNYNEKFKDRATLTVDTSISTAYMELSRLRSDDTAVYFCTRSHYGLDWNFDVWGQGTTVTVSSGGSSGQVQLVQSGAEVAKPGASVKVSCKASGYTFTRYTMHWVKQAPGQGLEWIGYINPSRGYTNYAQKFQGKATLTTDKSTSTAYMELSSLRSEDTAVYYCARYYDDHYSLDYWGQGTTLTVSSASGGSGDKTHTCPPCPAPEAAGGPSVFLFPPKPKDTLMISRTPEVTCVVVDVSHEDPEVKFNWYVDGVEVHNAKTKPREEQYNSTYRVVSVLTVLHQDWLNGKEYKCKVSNKALAAPIEKTISKAKGQPREPQVCTLPPSRDELTKNQVSLSCAVKGFYPSDIAVEWESNGQPENNYKTTPPVLDSDGSFFLVSKLTVDKSRWQQGNVFSCSVMHEALHNHYTQKSLSLSPGGGSSGSGSGGSGSSGVSHRYSRIQSIKVQFTEYKKEKGFILTSQKEDEIMKVQNNSVIINCDGFYLISLKGYFSQEVNISLHYQKDEEPLFQLKKVRSVNSLMVASLTYKDKVYLNVTTDNTSLDDFHVNGGELILIHQNPGEFCVLGGSGGSGGGSSGSGVSHRYSRIQSIKVQFTEYKKEKGFILTSQKEDEIMKVQNNSVIINCDGFYLISLKGYFSQEVNISLHYQKDEEPLFQLKKVRSVNSLMVASLTYKDKVYLNVTTDNTSLDDFHVNGGELILIHQNPGEFCVLGGSGGSGGGSSGSGVSHRYSRIQSIKVQFTEYKKEKGFILTSQKEDEIMKVQNNSVIINCDGFYLISLKGYFSQEVNISLHYQKDEEPLFQLKKVRSVNSLMVASLTYKDKVYLNVTTDNTSLDDFHVNGGELILIHQNPGEFCVL

SEQ ID NO: 321 - protein, 1153 aa, synthetic construct
  REGION 1..1153: note = _
DIQMTQSPSSLSASVGDRVTITCHASQNIYVWLNWYQQKPGKAPKLLIYKASNLHTGVPSRFSGSGSGTDFTLTISSLQPEDFATYYCQQGQTYPYTFGGGTKVEIKGGSSGDIQLTQSPSSLSASVGDRVTITCRASQSISYLNWYQQKPGKSPKRWIYDTSKLASGVPSRFSGSGSGTDYTLTISSMQPEDAATYYCQQWSSNPLTFGGGTKVEIKGGGGSGGSGSGGGGSASGSGQVQLVQSGAEVAKPGASVKVSCKASGYTFTRYTMHWVKQAPGQGLEWIGYINPSRGYTNYAQKFQGKATLTTDKSTSTAYMELSSLRSEDTAVYYCARYYDDHYSLDYWGQGTTLTVSSGGSSGQVQLVQSGAEVKKPGASVKVSCKASGYTFTSYYIHWVRQAPGQGLEWIGSIYPGNVNTNYNEKFKDRATLTVDTSISTAYMELSRLRSDDTAVYFCTRSHYGLDWNFDVWGQGTTVTVSSASGGSGDKTHTCPPCPAPEAAGGPSVFLFPPKPKDTLMISRTPEVTCVVVDVSHEDPEVKFNWYVDGVEVHNAKTKPREEQYNSTYRVVSVLTVLHQDWLNGKEYKCKVSNKALAAPIEKTISKAKGQPREPQVYTLPPSRDELTKNQVSLTCLVKGFYPSDIAVEWESNGQPENNYKTTPPVLDSDGSFFLYSKLTVDKSRWQQGNVFSCSVMHEALHNHYTQKSLSLSPGGGSSGSGSGGSGSSGVSHRYSRIQSIKVQFTEYKKEKGFILTSQKEDEIMKVQNNSVIINCDGFYLISLKGYFSQEVNISLHYQKDEEPLFQLKKVRSVNSLMVASLTYKDKVYLNVTTDNTSLDDFHVNGGELILIHQNPGEFCVLGGSGGSGGGSSGSGVSHRYSRIQSIKVQFTEYKKEKGFILTSQKEDEIMKVQNNSVIINCDGFYLISLKGYFSQEVNISLHYQKDEEPLFQLKKVRSVNSLMVASLTYKDKVYLNVTTDNTSLDDFHVNGGELILIHQNPGEFCVLGGSGGSGGGSSGSGVSHRYSRIQSIKVQFTEYKKEKGFILTSQKEDEIMKVQNNSVIINCDGFYLISLKGYFSQEVNISLHYQKDEEPLFQLKKVRSVNSLMVASLTYKDKVYLNVTTDNTSLDDFHVNGGELILIHQNPGEFCVL

SEQ ID NO: 322 - protein, 1153 aa, synthetic construct
  REGION 1..1153: note = _
DIQLTQSPSSLSASVGDRVTITCRASQSISYLNWYQQKPGKSPKRWIYDTSKLASGVPSRFSGSGSGTDYTLTISSMQPEDAATYYCQQWSSNPLTFGGGTKVEIKGGSSGDIQMTQSPSSLSASVGDRVTITCHASQNIYVWLNWYQQKPGKAPKLLIYKASNLHTGVPSRFSGSGSGTDFTLTISSLQPEDFATYYCQQGQTYPYTFGGGTKVEIKGGGGSGGSGSGGGGSASGSGQVQLVQSGAEVKKPGASVKVSCKASGYTFTSYYIHWVRQAPGQGLEWIGSIYPGNVNTNYNEKFKDRATLTVDTSISTAYMELSRLRSDDTAVYFCTRSHYGLDWNFDVWGQGTTVTVSSGGSSGQVQLVQSGAEVAKPGASVKVSCKASGYTFTRYTMHWVKQAPGQGLEWIGYINPSRGYTNYAQKFQGKATLTTDKSTSTAYMELSSLRSEDTAVYYCARYYDDHYSLDYWGQGTTLTVSSASGGSGDKTHTCPPCPAPEAAGGPSVFLFPPKPKDTLMISRTPEVTCVVVDVSHEDPEVKFNWYVDGVEVHNAKTKPREEQYNSTYRVVSVLTVLHQDWLNGKEYKCKVSNKALAAPIEKTISKAKGQPREPQVYTLPPSRDELTKNQVSLTCLVKGFYPSDIAVEWESNGQPENNYKTTPPVLDSDGSFFLYSKLTVDKSRWQQGNVFSCSVMHEALHNHYTQKSLSLSPGGGSSGSGSGGSGSSGVSHRYSRIQSIKVQFTEYKKEKGFILTSQKEDEIMKVQNNSVIINCDGFYLISLKGYFSQEVNISLHYQKDEEPLFQLKKVRSVNSLMVASLTYKDKVYLNVTTDNTSLDDFHVNGGELILIHQNPGEFCVLGGSGGSGGGSSGSGVSHRYSRIQSIKVQFTEYKKEKGFILTSQKEDEIMKVQNNSVIINCDGFYLISLKGYFSQEVNISLHYQKDEEPLFQLKKVRSVNSLMVASLTYKDKVYLNVTTDNTSLDDFHVNGGELILIHQNPGEFCVLGGSGGSGGGSSGSGVSHRYSRIQSIKVQFTEYKKEKGFILTSQKEDEIMKVQNNSVIINCDGFYLISLKGYFSQEVNISLHYQKDEEPLFQLKKVRSVNSLMVASLTYKDKVYLNVTTDNTSLDDFHVNGGELILIHQNPGEFCVL

SEQ ID NO: 323 - protein, 1285 aa, synthetic construct
  REGION 1..1285: note = _
DIQMTQSPSSLSASVGDRVTITCHASQNIYVWLNWYQQKPGKAPKLLIYKASNLHTGVPSRFSGSGSGTDFTLTISSLQPEDFATYYCQQGQTYPYTFGGGTKVEIKGGSSGDIQLTQSPSSLSASVGDRVTITCRASQSISYLNWYQQKPGKSPKRWIYDTSKLASGVPSRFSGSGSGTDYTLTISSMQPEDAATYYCQQWSSNPLTFGGGTKVEIKGGGGSGGSGSGGGGSASGSGQVQLVQSGAEVAKPGASVKVSCKASGYTFTRYTMHWVKQAPGQGLEWIGYINPSRGYTNYAQKFQGKATLTTDKSTSTAYMELSSLRSEDTAVYYCARYYDDHYSLDYWGQGTTLTVSSGGSSGQVQLVQSGAEVKKPGASVKVSCKASGYTFTSYYIHWVRQAPGQGLEWIGSIYPGNVNTNYNEKFKDRATLTVDTSISTAYMELSRLRSDDTAVYFCTRSHYGLDWNFDVWGQGTTVTVSSASGGSGDKTHTCPPCPAPEAAGGPSVFLFPPKPKDTLMISRTPEVTCVVVDVSHEDPEVKFNWYVDGVEVHNAKTKPREEQYNSTYRVVSVLTVLHQDWLNGKEYKCKVSNKALAAPIEKTISKAKGQPREPQVCTLPPSRDELTKNQVSLSCAVKGFYPSDIAVEWESNGQPENNYKTTPPVLDSDGSFFLVSKLTVDKSRWQQGNVFSCSVMHEALHNHYTQKSLSLSPGGGSGSGGGSGLREGPELSPDDPAGLLDLRQGMFAQLVAQNVLLIDGPLSWYSDPGLAGVSLTGGLSYKEDTKELVVAKAGVYYVFFQLELRRVVAGEGSGSVSLALHLQPLRSAAGAAALALTVDLPPASSEARNSAFGFQGRLLHLSAGQRLGVHLHTEARARHAWQLTQGATVLGLFRVTPEIPAGLPSPRSEGSLREGPELSPDDPAGLLDLRQGMFAQLVAQNVLLIDGPLSWYSDPGLAGVSLTGGLSYKEDTKELVVAKAGVYYVFFQLELRRVVAGEGSGSVSLALHLQPLRSAAGAAALALTVDLPPASSEARNSAFGFQGRLLHLSAGQRLGVHLHTEARARHAWQLTQGATVLGLFRVTPEIPAGLPSPRSEGSLREGPELSPDDPAGLLDLRQGMFAQLVAQNVLLIDGPLSWYSDPGLAGVSLTGGLSYKEDTKELVVAKAGVYYVFFQLELRRVVAGEGSGSVSLALHLQPLRSAAGAAALALTVDLPPASSEARNSAFGFQGRLLHLSAGQRLGVHLHTEARARHAWQLTQGATVLGLFRVTPEIPAGLPSPRSEGS

SEQ ID NO: 324 - protein, 1285 aa, synthetic construct
  REGION 1..1285: note = _
DIQLTQSPSSLSASVGDRVTITCRASQSISYLNWYQQKPGKSPKRWIYDTSKLASGVPSRFSGSGSGTDYTLTISSMQPEDAATYYCQQWSSNPLTFGGGTKVEIKGGSSGDIQMTQSPSSLSASVGDRVTITCHASQNIYVWLNWYQQKPGKAPKLLIYKASNLHTGVPSRFSGSGSGTDFTLTISSLQPEDFATYYCQQGQTYPYTFGGGTKVEIKGGGGSGGSGSGGGGSASGSGQVQLVQSGAEVKKPGASVKVSCKASGYTFTSYYIHWVRQAPGQGLEWIGSIYPGNVNTNYNEKFKDRATLTVDTSISTAYMELSRLRSDDTAVYFCTRSHYGLDWNFDVWGQGTTVTVSSGGSSGQVQLVQSGAEVAKPGASVKVSCKASGYTFTRYTMHWVKQAPGQGLEWIGYINPSRGYTNYAQKFQGKATLTTDKSTSTAYMELSSLRSEDTAVYYCARYYDDHYSLDYWGQGTTLTVSSASGGSGDKTHTCPPCPAPEAAGGPSVFLFPPKPKDTLMISRTPEVTCVVVDVSHEDPEVKFNWYVDGVEVHNAKTKPREEQYNSTYRVVSVLTVLHQDWLNGKEYKCKVSNKALAAPIEKTISKAKGQPREPQVCTLPPSRDELTKNQVSLSCAVKGFYPSDIAVEWESNGQPENNYKTTPPVLDSDGSFFLVSKLTVDKSRWQQGNVFSCSVMHEALHNHYTQKSLSLSPGGGSGSGGGSGLREGPELSPDDPAGLLDLRQGMFAQLVAQNVLLIDGPLSWYSDPGLAGVSLTGGLSYKEDTKELVVAKAGVYYVFFQLELRRVVAGEGSGSVSLALHLQPLRSAAGAAALALTVDLPPASSEARNSAFGFQGRLLHLSAGQRLGVHLHTEARARHAWQLTQGATVLGLFRVTPEIPAGLPSPRSEGSLREGPELSPDDPAGLLDLRQGMFAQLVAQNVLLIDGPLSWYSDPGLAGVSLTGGLSYKEDTKELVVAKAGVYYVFFQLELRRVVAGEGSGSVSLALHLQPLRSAAGAAALALTVDLPPASSEARNSAFGFQGRLLHLSAGQRLGVHLHTEARARHAWQLTQGATVLGLFRVTPEIPAGLPSPRSEGSLREGPELSPDDPAGLLDLRQGMFAQLVAQNVLLIDGPLSWYSDPGLAGVSLTGGLSYKEDTKELVVAKAGVYYVFFQLELRRVVAGEGSGSVSLALHLQPLRSAAGAAALALTVDLPPASSEARNSAFGFQGRLLHLSAGQRLGVHLHTEARARHAWQLTQGATVLGLFRVTPEIPAGLPSPRSEGS

SEQ ID NO: 325 - protein, 1285 aa, synthetic construct
  REGION 1..1285: note = _
DIQMTQSPSSLSASVGDRVTITCHASQNIYVWLNWYQQKPGKAPKLLIYKASNLHTGVPSRFSGSGSGTDFTLTISSLQPEDFATYYCQQGQTYPYTFGGGTKVEIKGGSSGDIQLTQSPSSLSASVGDRVTITCRASQSISYLNWYQQKPGKSPKRWIYDTSKLASGVPSRFSGSGSGTDYTLTISSMQPEDAATYYCQQWSSNPLTFGGGTKVEIKGGGGSGGSGSGGGGSASGSGQVQLVQSGAEVAKPGASVKVSCKASGYTFTRYTMHWVKQAPGQGLEWIGYINPSRGYTNYAQKFQGKATLTTDKSTSTAYMELSSLRSEDTAVYYCARYYDDHYSLDYWGQGTTLTVSSGGSSGQVQLVQSGAEVKKPGASVKVSCKASGYTFTSYYIHWVRQAPGQGLEWIGSIYPGNVNTNYNEKFKDRATLTVDTSISTAYMELSRLRSDDTAVYFCTRSHYGLDWNFDVWGQGTTVTVSSASGGSGDKTHTCPPCPAPEAAGGPSVFLFPPKPKDTLMISRTPEVTCVVVDVSHEDPEVKFNWYVDGVEVHNAKTKPREEQYNSTYRVVSVLTVLHQDWLNGKEYKCKVSNKALAAPIEKTISKAKGQPREPQVYTLPPSRDELTKNQVSLTCLVKGFYPSDIAVEWESNGQPENNYKTTPPVLDSDGSFFLYSKLTVDKSRWQQGNVFSCSVMHEALHNHYTQKSLSLSPGGGSGSGGGSGLREGPELSPDDPAGLLDLRQGMFAQLVAQNVLLIDGPLSWYSDPGLAGVSLTGGLSYKEDTKELVVAKAGVYYVFFQLELRRVVAGEGSGSVSLALHLQPLRSAAGAAALALTVDLPPASSEARNSAFGFQGRLLHLSAGQRLGVHLHTEARARHAWQLTQGATVLGLFRVTPEIPAGLPSPRSEGSLREGPELSPDDPAGLLDLRQGMFAQLVAQNVLLIDGPLSWYSDPGLAGVSLTGGLSYKEDTKELVVAKAGVYYVFFQLELRRVVAGEGSGSVSLALHLQPLRSAAGAAALALTVDLPPASSEARNSAFGFQGRLLHLSAGQRLGVHLHTEARARHAWQLTQGATVLGLFRVTPEIPAGLPSPRSEGSLREGPELSPDDPAGLLDLRQGMFAQLVAQNVLLIDGPLSWYSDPGLAGVSLTGGLSYKEDTKELVVAKAGVYYVFFQLELRRVVAGEGSGSVSLALHLQPLRSAAGAAALALTVDLPPASSEARNSAFGFQGRLLHLSAGQRLGVHLHTEARARHAWQLTQGATVLGLFRVTPEIPAGLPSPRSEGS

SEQ ID NO: 326 - protein, 1285 aa, synthetic construct
  REGION 1..1285: note = _
DIQLTQSPSSLSASVGDRVTITCRASQSISYLNWYQQKPGKSPKRWIYDTSKLASGVPSRFSGSGSGTDYTLTISSMQPEDAATYYCQQWSSNPLTFGGGTKVEIKGGSSGDIQMTQSPSSLSASVGDRVTITCHASQNIYVWLNWYQQKPGKAPKLLIYKASNLHTGVPSRFSGSGSGTDFTLTISSLQPEDFATYYCQQGQTYPYTFGGGTKVEIKGGGGSGGSGSGGGGSASGSGQVQLVQSGAEVKKPGASVKVSCKASGYTFTSYYIHWVRQAPGQGLEWIGSIYPGNVNTNYNEKFKDRATLTVDTSISTAYMELSRLRSDDTAVYFCTRSHYGLDWNFDVWGQGTTVTVSSGGSSGQVQLVQSGAEVAKPGASVKVSCKASGYTFTRYTMHWVKQAPGQGLEWIGYINPSRGYTNYAQKFQGKATLTTDKSTSTAYMELSSLRSEDTAVYYCARYYDDHYSLDYWGQGTTLTVSSASGGSGDKTHTCPPCPAPEAAGGPSVFLFPPKPKDTLMISRTPEVTCVVVDVSHEDPEVKFNWYVDGVEVHNAKTKPREEQYNSTYRVVSVLTVLHQDWLNGKEYKCKVSNKALAAPIEKTISKAKGQPREPQVYTLPPSRDELTKNQVSLTCLVKGFYPSDIAVEWESNGQPENNYKTTPPVLDSDGSFFLYSKLTVDKSRWQQGNVFSCSVMHEALHNHYTQKSLSLSPGGGSGSGGGSGLREGPELSPDDPAGLLDLRQGMFAQLVAQNVLLIDGPLSWYSDPGLAGVSLTGGLSYKEDTKELVVAKAGVYYVFFQLELRRVVAGEGSGSVSLALHLQPLRSAAGAAALALTVDLPPASSEARNSAFGFQGRLLHLSAGQRLGVHLHTEARARHAWQLTQGATVLGLFRVTPEIPAGLPSPRSEGSLREGPELSPDDPAGLLDLRQGMFAQLVAQNVLLIDGPLSWYSDPGLAGVSLTGGLSYKEDTKELVVAKAGVYYVFFQLELRRVVAGEGSGSVSLALHLQPLRSAAGAAALALTVDLPPASSEARNSAFGFQGRLLHLSAGQRLGVHLHTEARARHAWQLTQGATVLGLFRVTPEIPAGLPSPRSEGSLREGPELSPDDPAGLLDLRQGMFAQLVAQNVLLIDGPLSWYSDPGLAGVSLTGGLSYKEDTKELVVAKAGVYYVFFQLELRRVVAGEGSGSVSLALHLQPLRSAAGAAALALTVDLPPASSEARNSAFGFQGRLLHLSAGQRLGVHLHTEARARHAWQLTQGATVLGLFRVTPEIPAGLPSPRSEGS

SEQ ID NO: 327 - protein, 132 aa, synthetic construct
  REGION 1..132: note = _
QMQLQESGPGLVKPSETLSLTCSVSGASISDSYWSWIRRSPGKGLEWIGYVHKSGDTNYSPSLKSRVNLSLDTSKNQVSLSLVAATAADSGKYYCARTLHGRRIYGIVAFNEWFTYFYMDVWGNGTQVTVSS

SEQ ID NO: 328 - protein, 121 aa, synthetic construct
  REGION 1..121: note = _
QVQLVQSGGQMKKPGESMRISCRASGYEFIDCTLNWIRLAPGKRPEWMGWLKPRGGAVNYARPLQGRVTMTRDVYSDTAFLELRSLTVDDTAVYFCTRGKNCDYNWDFEHWGRGTPVIVSS

SEQ ID NO: 329 - protein, 131 aa, synthetic construct
  REGION 1..131: note = _
EVRLVESGGGLVKPGGSLRLSCSASGFDFDNAWMTWVRQPPGKGLEWVGRITGPGEGWSVDYAESVKGRFTISRDNTKNTLYLEMNNVRTEDTGYYFCARTGKYYDFWSGYPPGEEYFQDWGQGTLVIVSS

SEQ ID NO: 330 - protein, 137 aa, synthetic construct
  REGION 1..137: note = _
QEQLVESGGGVVQPGGSLRLSCLASGFTFHKYGMHWVRQAPGKGLEWVALISDDGMRKYHSDSMWGRVTISRDNSKNTLYLQFSSLKVEDTAMFFCAREAGGPIWHDDVKYYDFNDGYYNYHYMDVWGKGTTVTVSS

SEQ ID NO: 331 - protein, 105 aa, synthetic construct
  REGION 1..105: note = _
SDISVAPGETARISCGEKSLGSRAVQWYQHRAGQAPSLIIYNNQDRPSGIPERFSGSPDSPFGTTATLTITSVEAGDEADYYCHIWDSRVPTKWVFGGGTTLTVL

SEQ ID NO: 332 - protein, 100 aa, synthetic construct
  REGION 1..100: note = _
LTQSPGTLSLSPGETAIISCRTSQYGSLAWYQQRPGQAPRLVIYSGSTRAAGIPDRFSGSRWGPDYNLTISNLESGDFGVYYCQQYEFFGQGTKVQVDIK

SEQ ID NO: 333 - protein, 108 aa, synthetic construct
  REGION 1..108: note = _
SELTQDPAVSVALKQTVTITCRGDSLRSHYASWYQKKPGQAPVLLFYGKNNRPSGIPDRFSGSASGNRASLTITGAQAEDEADYYCSSRDKSGSRLSVFGGGTKLTVL

SEQ ID NO: 334 - protein, 110 aa, synthetic construct
  REGION 1..110: note = _
QSALTQPASVSGSPGQTITISCNGTSSDVGGFDSVSWYQQSPGKAPKVMVFDVSHRPSGISNRFSGSKSGNTASLTISGLHIEDEGDYFCSSLTDRSHRIFGGGTKVTVL

SEQ ID NO: 335 - protein, 5 aa, synthetic construct
  REGION 1..5: note = _
DSYWS

SEQ ID NO: 336 - protein, 16 aa, synthetic construct
  REGION 1..16: note = _
YVHKSGDTNYSPSLKS

SEQ ID NO: 337 - protein, 24 aa, synthetic construct
  REGION 1..24: note = _
TLHGRRIYGIVAFNEWFTYFYMDV

SEQ ID NO: 338 - protein, 5 aa, synthetic construct
  REGION 1..5: note = _
DCTLN

SEQ ID NO: 339 - protein, 17 aa, synthetic construct
  REGION 1..17: note = _
WLKPRGGAVNYARPLQG

SEQ ID NO: 340 - protein, 12 aa, synthetic construct
  REGION 1..12: note = _
GKNCDYNWDFEH

SEQ ID NO: 341 - protein, 5 aa, synthetic construct
  REGION 1..5: note = _
NAWMT

SEQ ID NO: 342 - protein, 19 aa, synthetic construct
  REGION 1..19: note = _
RITGPGEGWSVDYAESVKG

SEQ ID NO: 343 - protein, 20 aa, synthetic construct
  REGION 1..20: note = _
TGKYYDFWSGYPPGEEYFQD

SEQ ID NO: 344 - protein, 5 aa, synthetic construct
  REGION 1..5: note = _
KYGMH

SEQ ID NO: 345 - protein, 17 aa, synthetic construct
  REGION 1..17: note = _
LISDDGMRKYHSDSMWG

SEQ ID NO: 346 - protein, 28 aa, synthetic construct
  REGION 1..28: note = _
EAGGPIWHDDVKYYDFNDGYYNYHYMDV

SEQ ID NO: 347 - protein, 14 aa, synthetic construct
  REGION 1..14: note = _
NGTSSDVGGFDSVS

SEQ ID NO: 348 - protein, 7 aa, synthetic construct
  REGION 1..7: note = _
DVSHRPS

SEQ ID NO: 349 - protein, 10 aa, synthetic construct
  REGION 1..10: note = _
SSLTDRSHRI

SEQ ID NO: 350 - protein, 11 aa, synthetic construct
  REGION 1..11: note = _
GEKSLGSRAVQ

SEQ ID NO: 351 - protein, 7 aa, synthetic construct
  REGION 1..7: note = _
NNQDRPS

SEQ ID NO: 352 - protein, 9 aa, synthetic construct
  REGION 1..9: note = _
DSRVPTKWV

SEQ ID NO: 353 - protein, 9 aa, synthetic construct
  REGION 1..9: note = _
RTSQYGSLA

SEQ ID NO: 354 - protein, 7 aa, synthetic construct
  REGION 1..7: note = _
SGSTRAA

SEQ ID NO: 355 - protein, 5 aa, synthetic construct
  REGION 1..5: note = _
QQYEF

SEQ ID NO: 356 - protein, 11 aa, synthetic construct
  REGION 1..11: note = _
RGDSLRSHYAS

SEQ ID NO: 357 - protein, 7 aa, synthetic construct
  REGION 1..7: note = _
GKNNRPS

SEQ ID NO: 358 - protein, 12 aa, synthetic construct
  REGION 1..12: note = _
SSRDKSGSRLSV

SEQ ID NO: 359 - protein, 241 aa, synthetic construct
  REGION 1..241: note = _
LTQSPGTLSLSPGETAIISCRTSQYGSLAWYQQRPGQAPRLVIYSGSTRAAGIPDRFSGSRWGPDYNLTISNLESGDFGVYYCQQYEFFGQGTKVQVDIKGGGGSGGSGSGGGGSASGSGQVQLVQSGGQMKKPGESMRISCRASGYEFIDCTLNWIRLAPGKRPEWMGWLKPRGGAVNYARPLQGRVTMTRDVYSDTAFLELRSLTVDDTAVYFCTRGKNCDYNWDFEHWGRGTPVIVSS

SEQ ID NO: 360 - DNA, 1428 bp, synthetic construct
  misc_feature 1..1428: note = _
  source 1..1428: mol_type = other DNA
gagatcgtgctgacacagagccctggcaccctgagcctgtctccaggcgagacagccatcatcagctgccggacaagccagtacggcagcctggcctggtatcagcagaggcctggacaggcccccagactcgtgatctacagcggcagcacaagagccgccggaatccccgatagattcagcggctccagatggggccctgactacaacctgaccatcagcaacctggaaagcggcgacttcggcgtgtactactgccagcagtacgagttcttcggccagggcaccaaggtgcaggtggacatcaagggcggcggaggaagcggcggatctggatctggtggcggaggatctgcttctggctctggacaggttcagctggttcagtctggcggacagatgaagaaacccggcgagagcatgcggatcagctgtagagccagcggctacgagttcatcgactgcaccctgaactggatcagactggcccctggcaaaagacccgagtggatgggatggctgaagcctagaggcggagccgtgaattacgccagacctctgcagggcagagtgaccatgaccagggacgtgtacagcgataccgccttcctggaactgagaagcctgaccgtggatgataccgccgtgtacttctgcacccggggcaagaactgcgactacaactgggacttcgagcactggggcagaggcacacctgtgatcgttagctctgctagcggaggttccggagataagacccacacatgtcctccatgtcctgctccagaactgctgggcggaccttccgtgtttctgttccctccaaagcctaaggacaccctgatgatcagcaggacccctgaagtgacctgcgtggtggtggatgtgtctcacgaggacccagaagtgaagttcaattggtacgtggacggcgtggaagtgcacaacgccaagaccaagcctagagaggaacagtacaacagcacctacagagtggtgtccgtgctgacagtgctgcaccaggattggctgaacggcaaagagtacaagtgcaaggtgtccaacaaggccctgcccgcccctatcgagaaaaccatcagcaaggccaagggccagcctagggaaccccaggtttacacccttcctccatgccgggatgagctgaccaagaaccaggtgtccctgtggtgtctggtcaagggcttctaccccagcgacattgccgtggaatgggagagcaatggccagcctgagaacaactacaagaccacacctcctgtgctggactccgacggatcattcttcctgtacagcaagctgactgtggacaagagcagatggcagcagggcaacgtgttcagctgcagcgtgatgcacgaggccctgcacaaccactacacacagaagtccctgtctctgagccctggc

SEQ ID NO: 361 - protein, 259 aa, synthetic construct
  REGION 1..259: note = _
SELTQDPAVSVALKQTVTITCRGDSLRSHYASWYQKKPGQAPVLLFYGKNNRPSGIPDRFSGSASGNRASLTITGAQAEDEADYYCSSRDKSGSRLSVFGGGTKLTVLGGGGSGGSGSGGGGSASGSGEVRLVESGGGLVKPGGSLRLSCSASGFDFDNAWMTWVRQPPGKGLEWVGRITGPGEGWSVDYAESVKGRFTISRDNTKNTLYLEMNNVRTEDTGYYFCARTGKYYDFWSGYPPGEEYFQDWGQGTLVIVSS

SEQ ID NO: 362 - DNA, 1473 bp, synthetic construct
  misc_feature 1..1473: note = _
  source 1..1473: mol_type = other DNA
agcgaactgacccaagatcctgccgtgtctgtggccctgaagcagaccgtgaccatcacctgtagaggcgacagcctgagaagccactacgccagctggtatcagaagaagcctggacaggctcccgtgctgctgttctacggcaagaacaacagacccagcggcatccccgatagattttctggcagcgccagcggcaatagagccagcctgacaattactggcgcccaggccgaagatgaggccgactactactgcagcagcagagacaagagcggcagcagactgtccgtttttggcggaggcaccaagctgaccgtgctgggcggcggaggaagcggcggatctggatctggtggcggaggatctgcttctggctctggagaagttcggctggtggaatctggcggcggacttgtgaaacctggcggctctctgagactgagctgtagcgcctccggcttcgacttcgacaatgcctggatgacctgggtccgacagcctcctggaaaaggcctggaatgggtcggaagaatcacaggccctggcgaaggctggagtgtggattatgccgagagcgtgaagggcagattcaccatcagccgggacaacaccaagaacaccctgtacctggaaatgaacaacgtgcggaccgaggataccggctactacttctgtgcccggaccggcaagtactacgacttttggagcggctaccctcctggcgaggaatactttcaggattggggccagggcaccctggtcatcgtttcttctgctagcggaggttccggagataagacccacacatgtcctccatgtcctgctccagaactgctgggcggaccttccgtgtttctgttccctccaaagcctaaggacaccctgatgatcagcaggacccctgaagtgacctgcgtggtggtggatgtgtctcacgaggacccagaagtgaagttcaattggtacgtggacggcgtggaagtgcacaacgccaagaccaagcctagagaggaacagtacaacagcacctacagagtggtgtccgtgctgacagtgctgcaccaggattggctgaacggcaaagagtacaagtgcaaggtgtccaacaaggccctgcccgcccctatcgagaaaaccatcagcaaggccaagggccagcctagggaaccccaggtttacacccttcctccatgccgggatgagctgaccaagaaccaggtgtccctgtggtgtctggtcaagggcttctaccccagcgacattgccgtggaatgggagagcaatggccagcctgagaacaactacaagaccacacctcctgtgctggactccgacggatcattcttcctgtacagcaagctgactgtggacaagagcagatggcagcagggcaacgtgttcagctgcagcgtgatgcacgaggccctgcacaaccactacacacagaagtccctgtctctgagccctggc

SEQ ID NO: 363 - DNA, 2169 bp, synthetic construct
  misc_feature 1..2169: note = _
  source 1..2169: mol_type = other DNA
agcgatatctctgtggcccctggcgagacagccagaatcagctgtggcgagaagtccctgggaagcagagccgtgcagtggtatcagcatagagccggacaggcccctagcctgatcatctacaacaaccaggacagacccagcggcatccccgagagattttctggcagccctgatagccctttcggcaccacagccacactgaccatcacatctgtggaagccggcgacgaggccgactactactgtcacatctgggacagcagggtgcccaccaaatgggttttcggcggaggcacaaccctgaccgttctgggcggatcttctggagagatcgtgctgacacagagccctggcaccctgagcctgtctccaggcgagacagccatcatcagctgccggacaagccagtacggcagcctggcctggtatcagcagaggcctggacaggcccccagactcgtgatctacagcggcagcacaagagccgccggaatccccgatagattcagcggctccagatggggccctgactacaacctgaccatcagcaacctggaaagcggcgacttcggcgtgtactactgccagcagtacgagttcttcggccagggcaccaaggtgcaggtggacatcaagggaggcggaggatctggcggatctggaagtggcggcggtggatctgcttctggctctggccaggttcagctggttcagtctggcggacagatgaagaaacccggcgagagcatgcggatcagctgtagagccagcggctacgagttcatcgactgcaccctgaactggatcagactggcccctggcaaaagacccgagtggatgggatggctgaagcctagaggcggagccgtgaattacgccagacctctgcagggcagagtgaccatgaccagggacgtgtacagcgataccgccttcctggaactgagaagcctgaccgtggatgataccgccgtgtacttctgcacccggggcaagaactgcgactacaactgggacttcgagcactggggcagaggcacacctgtgatcgttagctctggcggatcttctggacagatgcagctccaagagtctggccctggcctggtcaagcctagcgaaacactgagcctgacctgttccgtgtccggcgccagcatcagcgatagctactggtcctggatcagaagaagccccggcaaaggcctggaatggatcggctacgtgcacaagagcggcgacaccaactatagccccagcctgaagtccagagtgaacctgagcctggacaccagcaagaaccaggtgtccctgtctctggtggccgctacagctgccgatagcggcaagtactactgcgccagaactctgcacggcagacggatctatggcatcgtggccttcaacgagtggttcacctacttctacatggacgtgtggggcaacggcacccaagtgacagtctcttctgcaagcggaggctccggagataagacccacacatgtcctccatgtcctgctccagagctgctgggtggcccttccgtgtttctgttccctccaaagcctaaggacaccctgatgatcagcaggacccctgaagtgacctgcgtggtggtggatgtgtctcacgaggacccagaagtgaagttcaattggtacgtggacggcgtggaagtgcacaacgccaagaccaagcctagagaggaacagtacaacagcacctacagagtggtgtccgtgctgaccgtgctgcaccaggattggctgaacggcaaagagtacaagtgcaaggtgtccaacaaggccctgcccgctcctatcgagaaaaccatcagcaaggccaagggccagcctcgcgaacctcaagtctgtacactgcctcctagccgggacgagctgaccaagaatcaggtgtcactgagctgcgccgtgaagggcttttaccccagcgacattgccgtggaatgggagagcaatggccagccagagaacaactacaagacaacccctcctgtgctggacagcgacggctcatttttcctggtgtccaagctgacagtggacaagagcagatggcagcagggcaacgtgttcagctgcagcgtgatgcacgaggccctgcacaaccactacacccagaaaagcctgtctctgagccctggc

SEQ ID NO: 364 - DNA, 2169 bp, synthetic construct
  misc_feature 1..2169: note = _
  source 1..2169: mol_type = other DNA
gagatcgtgctgacacagagccctggcaccctgagcctgtctccaggcgagacagccatcatcagctgccggacaagccagtacggcagcctggcctggtatcagcagaggcctggacaggcccccagactcgtgatctacagcggcagcacaagagccgccggaatccccgatagattcagcggctccagatggggccctgactacaacctgaccatcagcaacctggaaagcggcgacttcggcgtgtactactgccagcagtacgagttcttcggccagggcaccaaggtgcaggtggacatcaagggcggatcttctggaagcgatatctctgtggcccctggcgagacagccagaatcagctgtggcgagaagtccctgggaagcagagccgtgcagtggtatcagcatagagccggacaggcccctagcctgatcatctacaacaaccaggacagacccagcggcatccccgagagattttctggcagccctgatagccctttcggcaccacagccacactgaccatcacatctgtggaagccggcgacgaggccgactactactgtcacatctgggacagcagggtgcccaccaaatgggttttcggcggaggcacaaccctgaccgttctgggaggcggaggatctggcggatctggaagtggcggcggtggatctgcttctggctctggccagatgcagctccaagagtctggccctggcctggtcaagcctagcgaaacactgagcctgacctgttccgtgtccggcgccagcatcagcgatagctactggtcctggatcagaagaagccccggcaaaggcctggaatggatcggctacgtgcacaagagcggcgacaccaactatagccccagcctgaagtccagagtgaacctgagcctggacaccagcaagaaccaggtgtccctgtctctggtggccgctacagctgccgatagcggcaagtactactgcgccagaactctgcacggcagacggatctatggcatcgtggccttcaacgagtggttcacctacttctacatggacgtgtggggcaacggcacccaagtgacagtctcttctggcggatcttctggacaggttcagctggttcagtctggcggacagatgaagaaacccggcgagagcatgcggatcagctgtagagccagcggctacgagttcatcgactgcaccctgaactggatcagactggcccctggcaaaagacccgagtggatgggatggctgaagcctagaggcggagccgtgaattacgccagacctctgcagggcagagtgaccatgaccagggacgtgtacagcgataccgccttcctggaactgagaagcctgaccgtggatgataccgccgtgtacttctgcacccggggcaagaactgcgactacaactgggacttcgagcactggggcagaggcacacctgtgatcgttagctctgcaagcggaggctccggagataagacccacacatgtcctccatgtcctgctccagagctgctgggtggcccttccgtgtttctgttccctccaaagcctaaggacaccctgatgatcagcaggacccctgaagtgacctgcgtggtggtggatgtgtctcacgaggacccagaagtgaagttcaattggtacgtggacggcgtggaagtgcacaacgccaagaccaagcctagagaggaacagtacaacagcacctacagagtggtgtccgtgctgaccgtgctgcaccaggattggctgaacggcaaagagtacaagtgcaaggtgtccaacaaggccctgcccgctcctatcgagaaaaccatcagcaaggccaagggccagcctcgcgaacctcaagtctgtacactgcctcctagccgggacgagctgaccaagaatcaggtgtcactgagctgcgccgtgaagggcttttaccccagcgacattgccgtggaatgggagagcaatggccagccagagaacaactacaagacaacccctcctgtgctggacagcgacggctcatttttcctggtgtccaagctgacagtggacaagagcagatggcagcagggcaacgtgttcagctgcagcgtgatgcacgaggccctgcacaaccactacacccagaaaagcctgtctctgagccctggc

SEQ ID NO: 365 - DNA, 2244 bp, synthetic construct
  misc_feature 1..2244: note = _
  source 1..2244: mol_type = other DNA
agcgaactgacccaagatcctgccgtgtctgtggccctgaagcagaccgtgaccatcacctgtagaggcgacagcctgagaagccactacgccagctggtatcagaagaagcctggacaggctcccgtgctgctgttctacggcaagaacaacagacccagcggcatccccgatagattttctggcagcgccagcggcaatagagccagcctgacaattactggcgcccaggccgaagatgaggccgactactactgcagcagcagagacaagagcggcagcagactgtccgtttttggcggaggcaccaagctgaccgtgctgggcggatcttctggacagtctgctctgacacagcctgcctctgtgtctggctctcctggccagaccatcaccatcagctgtaacggcaccagctctgacgtcggcggctttgatagcgtgtcctggtatcagcagagccccggcaaagcccctaaagtgatggtgttcgatgtgtcccaccggcctagcggcatcagcaatagattcagcggcagcaagagcggcaacaccgccagcctgacaatctctggactgcacatcgaggacgagggcgactacttctgtagcagcctgaccgacagaagccaccggatttttggcggaggcaccaaagtgaccgtgctgggaggcggaggatctggcggatctggaagtggcggcggtggatctgcttctggctctggccaagaacagctggtggaatctggtggcggagtggttcaacctggcggctctctgagactgagctgtctggcctccggcttcaccttccacaaatacggcatgcactgggtccgacaggcccctggaaaaggccttgaatgggtcgccctgatcagcgacgacggcatgagaaagtaccacagcgacagcatgtggggcagagtgaccatcagccgggacaacagcaagaacaccctgtacctgcagttcagctccctgaaggtggaagataccgccatgttcttttgcgccagagaagccggcggacccatctggcatgacgacgtgaagtactacgacttcaacgacggctactacaactaccactacatggacgtgtggggcaagggcaccaccgtgacagtttcttctggcggatcttctggagaagttcggctggtggaatctggcggcggacttgtgaaacctggcggctctctgagactgagctgtagcgcctccggcttcgacttcgacaatgcctggatgacctgggtccgacagcctcctggaaaaggcctggaatgggtcggaagaatcacaggccctggcgaaggctggagtgtggattatgccgagagcgtgaagggcagattcaccatcagccgggacaacaccaagaacaccctgtacctggaaatgaacaacgtgcggaccgaggataccggctactacttctgtgcccggaccggcaagtactacgacttttggagcggctaccctcctggcgaggaatactttcaggattggggccagggcaccctggtcatcgtttcttctgcaagcggaggctccggagataagacccacacatgtcctccatgtcctgctccagaactgctgggcggaccttccgtgtttctgttccctccaaagcctaaggacaccctgatgatcagcaggacccctgaagtgacctgcgtggtggtggatgtgtctcacgaggacccagaagtgaagttcaattggtacgtggacggcgtggaagtgcacaacgccaagaccaagcctagagaggaacagtacaacagcacctacagagtggtgtccgtgctgacagtgctgcaccaggattggctgaacggcaaagagtacaagtgcaaggtgtccaacaaggccctgcccgcccctatcgagaaaaccatcagcaaggccaagggccagcctagggaaccccaggtttacacccttcctccatgccgggatgagctgaccaagaaccaggtgtccctgtggtgtctggtcaagggcttctaccccagcgacattgccgtggaatgggagagcaatggccagcctgagaacaactacaagaccacacctcctgtgctggactccgacggatcattcttcctgtacagcaagctgactgtggacaagagcagatggcagcagggcaacgtgttcagctgcagcgtgatgcacgaggccctgcacaaccactacacacagaagtccctgtctctgagccctggc

SEQ ID NO: 366 - DNA, 2244 bp, synthetic construct
  misc_feature 1..2244: note = _
  source 1..2244: mol_type = other DNA
cagtctgctctgacacagcctgcctctgtgtctggctctcctggccagaccatcaccatcagctgtaacggcaccagctctgacgtcggcggctttgatagcgtgtcctggtatcagcagagccccggcaaagcccctaaagtgatggtgttcgatgtgtcccaccggcctagcggcatcagcaatagattcagcggcagcaagagcggcaacaccgccagcctgacaatctctggactgcacatcgaggacgagggcgactacttctgtagcagcctgaccgacagaagccaccggatttttggcggaggcaccaaagtgaccgtgctgggcggatcttctggaagcgaactgacccaagatcctgccgtgtctgtggccctgaagcagaccgtgaccatcacctgtagaggcgacagcctgagaagccactacgccagctggtatcagaagaagcctggacaggctcccgtgctgctgttctacggcaagaacaacagacccagcggcatccccgatagattttctggcagcgccagcggcaatagagccagcctgacaattactggcgcccaggccgaagatgaggccgactactactgcagcagcagagacaagagcggcagcagactgtccgtttttggcggaggcaccaagctgaccgtgctgggaggcggaggatctggcggatctggaagtggcggcggtggatctgcttctggctctggcgaagttcggctggtggaatctggcggcggacttgtgaaacctggcggctctctgagactgagctgtagcgcctccggcttcgacttcgacaatgcctggatgacctgggtccgacagcctcctggaaaaggcctggaatgggtcggaagaatcacaggccctggcgaaggctggagtgtggattatgccgagagcgtgaagggcagattcaccatcagccgggacaacaccaagaacaccctgtacctggaaatgaacaacgtgcggaccgaggataccggctactacttctgtgcccggaccggcaagtactacgacttttggagcggctaccctcctggcgaggaatactttcaggattggggccagggcaccctggtcatcgtttcttctggcggatcttctggacaagaacagctggtggaatctggtggcggagtggttcaacctggcggctctctgagactgagctgtctggcctccggcttcaccttccacaaatacggcatgcactgggtccgacaggcccctggaaaaggccttgaatgggtcgccctgatcagcgacgacggcatgagaaagtaccacagcgacagcatgtggggcagagtgaccatcagccgggacaacagcaagaacaccctgtacctgcagttcagctccctgaaggtggaagataccgccatgttcttttgcgccagagaagccggcggacccatctggcatgacgacgtgaagtactacgacttcaacgacggctactacaactaccactacatggacgtgtggggcaagggcaccaccgtgacagtttcttctgcaagcggaggctccggagataagacccacacatgtcctccatgtcctgctccagaactgctgggcggaccttccgtgtttctgttccctccaaagcctaaggacaccctgatgatcagcaggacccctgaagtgacctgcgtggtggtggatgtgtctcacgaggacccagaagtgaagttcaattggtacgtggacggcgtggaagtgcacaacgccaagaccaagcctagagaggaacagtacaacagcacctacagagtggtgtccgtgctgacagtgctgcaccaggattggctgaacggcaaagagtacaagtgcaaggtgtccaacaaggccctgcccgcccctatcgagaaaaccatcagcaaggccaagggccagcctagggaaccccaggtttacacccttcctccatgccgggatgagctgaccaagaaccaggtgtccctgtggtgtctggtcaagggcttctaccccagcgacattgccgtggaatgggagagcaatggccagcctgagaacaactacaagaccacacctcctgtgctggactccgacggatcattcttcctgtacagcaagctgactgtggacaagagcagatggcagcagggcaacgtgttcagctgcagcgtgatgcacgaggccctgcacaaccactacacacagaagtccctgtctctgagccctggc

SEQ ID NO: 367 - DNA, 2214 bp, synthetic construct
  misc_feature 1..2214: note = _
  source 1..2214: mol_type = other DNA
agcgatatctctgtggcccctggcgagacagccagaatcagctgtggcgagaagtccctgggaagcagagccgtgcagtggtatcagcatagagccggacaggcccctagcctgatcatctacaacaaccaggacagacccagcggcatccccgagagattttctggcagccctgatagccctttcggcaccacagccacactgaccatcacatctgtggaagccggcgacgaggccgactactactgtcacatctgggacagcagggtgcccaccaaatgggttttcggcggaggcacaaccctgaccgttctgggcggatcttctggaagcgaactgacccaagatcctgccgtgtctgtggccctgaagcagaccgtgaccatcacctgtagaggcgacagcctgagaagccactacgccagctggtatcagaagaagcctggacaggctcccgtgctgctgttctacggcaagaacaacagacccagcggcatccccgatagattttctggcagcgccagcggcaatagagccagcctgacaattactggcgcccaggccgaagatgaggccgactactactgcagcagcagagacaagagcggcagcagactgtccgtttttggcggaggcaccaagctgaccgtgctgggaggcggaggatctggcggatctggaagtggcggcggtggatctgcttctggctctggcgaagttcggctggtggaatctggcggcggacttgtgaaacctggcggctctctgagactgagctgtagcgcctccggcttcgacttcgacaatgcctggatgacctgggtccgacagcctcctggaaaaggcctggaatgggtcggaagaatcacaggccctggcgaaggctggagtgtggattatgccgagagcgtgaagggcagattcaccatcagccgggacaacaccaagaacaccctgtacctggaaatgaacaacgtgcggaccgaggataccggctactacttctgtgcccggaccggcaagtactacgacttttggagcggctaccctcctggcgaggaatactttcaggattggggccagggcaccctggtcatcgtttcttctggcggatcttctggacagatgcagctccaagagtctggccctggcctggtcaagcctagcgaaacactgagcctgacctgttccgtgtccggcgccagcatcagcgatagctactggtcctggatcagaagaagccccggcaaaggcctggaatggatcggctacgtgcacaagagcggcgacaccaactatagccccagcctgaagtccagagtgaacctgagcctggacaccagcaagaaccaggtgtccctgtctctggtggccgctacagctgccgatagcggcaagtactactgcgccagaactctgcacggcagacggatctatggcatcgtggccttcaacgagtggttcacctacttctacatggacgtgtggggcaacggcacccaagtgacagtctcttctgcaagcggaggctccggagataagacccacacatgtcctccatgtcctgctccagagctgctgggtggcccttccgtgtttctgttccctccaaagcctaaggacaccctgatgatcagcaggacccctgaagtgacctgcgtggtggtggatgtgtctcacgaggacccagaagtgaagttcaattggtacgtggacggcgtggaagtgcacaacgccaagaccaagcctagagaggaacagtacaacagcacctacagagtggtgtccgtgctgaccgtgctgcaccaggattggctgaacggcaaagagtacaagtgcaaggtgtccaacaaggccctgcccgctcctatcgagaaaaccatcagcaaggccaagggccagcctcgcgaacctcaagtctgtacactgcctcctagccgggacgagctgaccaagaatcaggtgtcactgagctgcgccgtgaagggcttttaccccagcgacattgccgtggaatgggagagcaatggccagccagagaacaactacaagacaacccctcctgtgctggacagcgacggctcatttttcctggtgtccaagctgacagtggacaagagcagatggcagcagggcaacgtgttcagctgcagcgtgatgcacgaggccctgcacaaccactacacccagaaaagcctgtctctgagccctggc

SEQ ID NO: 368 - DNA, 2214 bp, synthetic construct
  misc_feature 1..2214: note = _
  source 1..2214: mol_type = other DNA
agcgaactgacccaagatcctgccgtgtctgtggccctgaagcagaccgtgaccatcacctgtagaggcgacagcctgagaagccactacgccagctggtatcagaagaagcctggacaggctcccgtgctgctgttctacggcaagaacaacagacccagcggcatccccgatagattttctggcagcgccagcggcaatagagccagcctgacaattactggcgcccaggccgaagatgaggccgactactactgcagcagcagagacaagagcggcagcagactgtccgtttttggcggaggcaccaagctgaccgtgctgggcggatcttctggaagcgatatctctgtggcccctggcgagacagccagaatcagctgtggcgagaagtccctgggaagcagagccgtgcagtggtatcagcatagagccggacaggcccctagcctgatcatctacaacaaccaggacagacccagcggcatccccgagagattttctggcagccctgatagccctttcggcaccacagccacactgaccatcacatctgtggaagccggcgacgaggccgactactactgtcacatctgggacagcagggtgcccaccaaatgggttttcggcggaggcacaaccctgaccgttctgggaggcggaggatctggcggatctggaagtggcggcggtggatctgcttctggctctggccagatgcagctccaagagtctggccctggcctggtcaagcctagcgaaacactgagcctgacctgttccgtgtccggcgccagcatcagcgatagctactggtcctggatcagaagaagccccggcaaaggcctggaatggatcggctacgtgcacaagagcggcgacaccaactatagccccagcctgaagtccagagtgaacctgagcctggacaccagcaagaaccaggtgtccctgtctctggtggccgctacagctgccgatagcggcaagtactactgcgccagaactctgcacggcagacggatctatggcatcgtggccttcaacgagtggttcacctacttctacatggacgtgtggggcaacggcacccaagtgacagtctcttctggcggatcttctggagaagttcggctggtggaatctggcggcggacttgtgaaacctggcggctctctgagactgagctgtagcgcctccggcttcgacttcgacaatgcctggatgacctgggtccgacagcctcctggaaaaggcctggaatgggtcggaagaatcacaggccctggcgaaggctggagtgtggattatgccgagagcgtgaagggcagattcaccatcagccgggacaacaccaagaacaccctgtacctggaaatgaacaacgtgcggaccgaggataccggctactacttctgtgcccggaccggcaagtactacgacttttggagcggctaccctcctggcgaggaatactttcaggattggggccagggcaccctggtcatcgtttcttctgcaagcggaggctccggagataagacccacacatgtcctccatgtcctgctccagagctgctgggtggcccttccgtgtttctgttccctccaaagcctaaggacaccctgatgatcagcaggacccctgaagtgacctgcgtggtggtggatgtgtctcacgaggacccagaagtgaagttcaattggtacgtggacggcgtggaagtgcacaacgccaagaccaagcctagagaggaacagtacaacagcacctacagagtggtgtccgtgctgaccgtgctgcaccaggattggctgaacggcaaagagtacaagtgcaaggtgtccaacaaggccctgcccgctcctatcgagaaaaccatcagcaaggccaagggccagcctcgcgaacctcaagtctgtacactgcctcctagccgggacgagctgaccaagaatcaggtgtcactgagctgcgccgtgaagggcttttaccccagcgacattgccgtggaatgggagagcaatggccagccagagaacaactacaagacaacccctcctgtgctggacagcgacggctcatttttcctggtgtccaagctgacagtggacaagagcagatggcagcagggcaacgtgttcagctgcagcgtgatgcacgaggccctgcacaaccactacacccagaaaagcctgtctctgagccctggc

SEQ ID NO: 369 - DNA, 2199 bp, synthetic construct
  misc_feature 1..2199: note = _
  source 1..2199: mol_type = other DNA
gagatcgtgctgacacagagccctggcaccctgagcctgtctccaggcgagacagccatcatcagctgccggacaagccagtacggcagcctggcctggtatcagcagaggcctggacaggcccccagactcgtgatctacagcggcagcacaagagccgccggaatccccgatagattcagcggctccagatggggccctgactacaacctgaccatcagcaacctggaaagcggcgacttcggcgtgtactactgccagcagtacgagttcttcggccagggcaccaaggtgcaggtggacatcaagggcggatcttctggacagtctgctctgacacagcctgcctctgtgtctggctctcctggccagaccatcaccatcagctgtaacggcaccagctctgacgtcggcggctttgatagcgtgtcctggtatcagcagagccccggcaaagcccctaaagtgatggtgttcgatgtgtcccaccggcctagcggcatcagcaatagattcagcggcagcaagagcggcaacaccgccagcctgacaatctctggactgcacatcgaggacgagggcgactacttctgtagcagcctgaccgacagaagccaccggatttttggcggaggcaccaaagtgaccgtgctgggaggcggaggatctggcggatctggaagtggcggcggtggatctgcttctggctctggccaagaacagctggtggaatctggtggcggagtggttcaacctggcggctctctgagactgagctgtctggcctccggcttcaccttccacaaatacggcatgcactgggtccgacaggcccctggaaaaggccttgaatgggtcgccctgatcagcgacgacggcatgagaaagtaccacagcgacagcatgtggggcagagtgaccatcagccgggacaacagcaagaacaccctgtacctgcagttcagctccctgaaggtggaagataccgccatgttcttttgcgccagagaagccggcggacccatctggcatgacgacgtgaagtactacgacttcaacgacggctactacaactaccactacatggacgtgtggggcaagggcaccaccgtgacagtttcttctggcggatcttctggacaggttcagctggttcagtctggcggacagatgaagaaacccggcgagagcatgcggatcagctgtagagccagcggctacgagttcatcgactgcaccctgaactggatcagactggcccctggcaaaagacccgagtggatgggatggctgaagcctagaggcggagccgtgaattacgccagacctctgcagggcagagtgaccatgaccagggacgtgtacagcgataccgccttcctggaactgagaagcctgaccgtggatgataccgccgtgtacttctgcacccggggcaagaactgcgactacaactgggacttcgagcactggggcagaggcacacctgtgatcgttagctctgcaagcggaggctccggagataagacccacacatgtcctccatgtcctgctccagaactgctgggcggaccttccgtgtttctgttccctccaaagcctaaggacaccctgatgatcagcaggacccctgaagtgacctgcgtggtggtggatgtgtctcacgaggacccagaagtgaagttcaattggtacgtggacggcgtggaagtgcacaacgccaagaccaagcctagagaggaacagtacaacagcacctacagagtggtgtccgtgctgacagtgctgcaccaggattggctgaacggcaaagagtacaagtgcaaggtgtccaacaaggccctgcccgcccctatcgagaaaaccatcagcaaggccaagggccagcctagggaaccccaggtttacacccttcctccatgccgggatgagctgaccaagaaccaggtgtccctgtggtgtctggtcaagggcttctaccccagcgacattgccgtggaatgggagagcaatggccagcctgagaacaactacaagaccacacctcctgtgctggactccgacggatcattcttcctgtacagcaagctgactgtggacaagagcagatggcagcagggcaacgtgttcagctgcagcgtgatgcacgaggccctgcacaaccactacacacagaagtccctgtctctgagccctggc

SEQ ID NO: 370 - DNA, 2199 bp, synthetic construct
  misc_feature 1..2199: note = _
  source 1..2199: mol_type = other DNA
cagtctgctctgacacagcctgcctctgtgtctggctctcctggccagaccatcaccatcagctgtaacggcaccagctctgacgtcggcggctttgatagcgtgtcctggtatcagcagagccccggcaaagcccctaaagtgatggtgttcgatgtgtcccaccggcctagcggcatcagcaatagattcagcggcagcaagagcggcaacaccgccagcctgacaatctctggactgcacatcgaggacgagggcgactacttctgtagcagcctgaccgacagaagccaccggatttttggcggaggcaccaaagtgaccgtgctgggcggatcttctggagagatcgtgctgacacagagccctggcaccctgagcctgtctccaggcgagacagccatcatcagctgccggacaagccagtacggcagcctggcctggtatcagcagaggcctggacaggcccccagactcgtgatctacagcggcagcacaagagccgccggaatccccgatagattcagcggctccagatggggccctgactacaacctgaccatcagcaacctggaaagcggcgacttcggcgtgtactactgccagcagtacgagttcttcggccagggcaccaaggtgcaggtggacatcaagggaggcggaggatctggcggatctggaagtggcggcggtggatctgcttctggctctggccaggttcagctggttcagtctggcggacagatgaagaaacccggcgagagcatgcggatcagctgtagagccagcggctacgagttcatcgactgcaccctgaactggatcagactggcccctggcaaaagacccgagtggatgggatggctgaagcctagaggcggagccgtgaattacgccagacctctgcagggcagagtgaccatgaccagggacgtgtacagcgataccgccttcctggaactgagaagcctgaccgtggatgataccgccgtgtacttctgcacccggggcaagaactgcgactacaactgggacttcgagcactggggcagaggcacacctgtgatcgttagctctggcggatcttctggacaagaacagctggtggaatctggtggcggagtggttcaacctggcggctctctgagactgagctgtctggcctccggcttcaccttccacaaatacggcatgcactgggtccgacaggcccctggaaaaggccttgaatgggtcgccctgatcagcgacgacggcatgagaaagtaccacagcgacagcatgtggggcagagtgaccatcagccgggacaacagcaagaacaccctgtacctgcagttcagctccctgaaggtggaagataccgccatgttcttttgcgccagagaagccggcggacccatctggcatgacgacgtgaagtactacgacttcaacgacggctactacaactaccactacatggacgtgtggggcaagggcaccaccgtgacagtttcttctgcaagcggaggctccggagataagacccacacatgtcctccatgtcctgctccagaactgctgggcggaccttccgtgtttctgttccctccaaagcctaaggacaccctgatgatcagcaggacccctgaagtgacctgcgtggtggtggatgtgtctcacgaggacccagaagtgaagttcaattggtacgtggacggcgtggaagtgcacaacgccaagaccaagcctagagaggaacagtacaacagcacctacagagtggtgtccgtgctgacagtgctgcaccaggattggctgaacggcaaagagtacaagtgcaaggtgtccaacaaggccctgcccgcccctatcgagaaaaccatcagcaaggccaagggccagcctagggaaccccaggtttacacccttcctccatgccgggatgagctgaccaagaaccaggtgtccctgtggtgtctggtcaagggcttctaccccagcgacattgccgtggaatgggagagcaatggccagcctgagaacaactacaagaccacacctcctgtgctggactccgacggatcattcttcctgtacagcaagctgactgtggacaagagcagatggcagcagggcaacgtgttcagctgcagcgtgatgcacgaggccctgcacaaccactacacacagaagtccctgtctctgagccctggc

SEQ ID NO: 371 - DNA, 2238 bp, synthetic construct
  misc_feature 1..2238: note = _
  source 1..2238: mol_type = other DNA
agcgatatctctgtggcccctggcgagacagccagaatcagctgtggcgagaagtccctgggaagcagagccgtgcagtggtatcagcatagagccggacaggcccctagcctgatcatctacaacaaccaggacagacccagcggcatccccgagagattttctggcagccctgatagccctttcggcaccacagccacactgaccatcacatctgtggaagccggcgacgaggccgactactactgtcacatctgggacagcagggtgcccaccaaatgggttttcggcggaggcacaaccctgaccgttctgggcggatcttctggacagtctgctctgacacagcctgcctctgtgtctggctctcctggccagaccatcaccatcagctgtaacggcaccagctctgacgtcggcggctttgatagcgtgtcctggtatcagcagagccccggcaaagcccctaaagtgatggtgttcgatgtgtcccaccggcctagcggcatcagcaatagattcagcggcagcaagagcggcaacaccgccagcctgacaatctctggactgcacatcgaggacgagggcgactacttctgtagcagcctgaccgacagaagccaccggatttttggcggaggcaccaaagtgaccgtgctgggaggcggaggatctggcggatctggaagtggcggcggtggatctgcttctggctctggccaagaacagctggtggaatctggtggcggagtggttcaacctggcggctctctgagactgagctgtctggcctccggcttcaccttccacaaatacggcatgcactgggtccgacaggcccctggaaaaggccttgaatgggtcgccctgatcagcgacgacggcatgagaaagtaccacagcgacagcatgtggggcagagtgaccatcagccgggacaacagcaagaacaccctgtacctgcagttcagctccctgaaggtggaagataccgccatgttcttttgcgccagagaagccggcggacccatctggcatgacgacgtgaagtactacgacttcaacgacggctactacaactaccactacatggacgtgtggggcaagggcaccaccgtgacagtttcttctggcggatcttctggacagatgcagctccaagagtctggccctggcctggtcaagcctagcgaaacactgagcctgacctgttccgtgtccggcgccagcatcagcgatagctactggtcctggatcagaagaagccccggcaaaggcctggaatggatcggctacgtgcacaagagcggcgacaccaactatagccccagcctgaagtccagagtgaacctgagcctggacaccagcaagaaccaggtgtccctgtctctggtggccgctacagctgccgatagcggcaagtactactgcgccagaactctgcacggcagacggatctatggcatcgtggccttcaacgagtggttcacctacttctacatggacgtgtggggcaacggcacccaagtgacagtctcttctgcaagcggaggctccggagataagacccacacatgtcctccatgtcctgctccagagctgctgggtggcccttccgtgtttctgttccctccaaagcctaaggacaccctgatgatcagcaggacccctgaagtgacctgcgtggtggtggatgtgtctcacgaggacccagaagtgaagttcaattggtacgtggacggcgtggaagtgcacaacgccaagaccaagcctagagaggaacagtacaacagcacctacagagtggtgtccgtgctgaccgtgctgcaccaggattggctgaacggcaaagagtacaagtgcaaggtgtccaacaaggccctgcccgctcctatcgagaaaaccatcagcaaggccaagggccagcctcgcgaacctcaagtctgtacactgcctcctagccgggacgagctgaccaagaatcaggtgtcactgagctgcgccgtgaagggcttttaccccagcgacattgccgtggaatgggagagcaatggccagccagagaacaactacaagacaacccctcctgtgctggacagcgacggctcatttttcctggtgtccaagctgacagtggacaagagcagatggcagcagggcaacgtgttcagctgcagcgtgatgcacgaggccctgcacaaccactacacccagaaaagcctgtctctgagccctggc

SEQ ID NO: 372 - DNA, 2238 bp, synthetic construct
  misc_feature 1..2238: note = _
  source 1..2238: mol_type = other DNA
cagtctgctctgacacagcctgcctctgtgtctggctctcctggccagaccatcaccatcagctgtaacggcaccagctctgacgtcggcggctttgatagcgtgtcctggtatcagcagagccccggcaaagcccctaaagtgatggtgttcgatgtgtcccaccggcctagcggcatcagcaatagattcagcggcagcaagagcggcaacaccgccagcctgacaatctctggactgcacatcgaggacgagggcgactacttctgtagcagcctgaccgacagaagccaccggatttttggcggaggcaccaaagtgaccgtgctgggcggatcttctggaagcgatatctctgtggcccctggcgagacagccagaatcagctgtggcgagaagtccctgggaagcagagccgtgcagtggtatcagcatagagccggacaggcccctagcctgatcatctacaacaaccaggacagacccagcggcatccccgagagattttctggcagccctgatagccctttcggcaccacagccacactgaccatcacatctgtggaagccggcgacgaggccgactactactgtcacatctgggacagcagggtgcccaccaaatgggttttcggcggaggcacaaccctgaccgttctgggaggcggaggatctggcggatctggaagtggcggcggtggatctgcttctggctctggccagatgcagctccaagagtctggccctggcctggtcaagcctagcgaaacactgagcctgacctgttccgtgtccggcgccagcatcagcgatagctactggtcctggatcagaagaagccccggcaaaggcctggaatggatcggctacgtgcacaagagcggcgacaccaactatagccccagcctgaagtccagagtgaacctgagcctggacaccagcaagaaccaggtgtccctgtctctggtggccgctacagctgccgatagcggcaagtactactgcgccagaactctgcacggcagacggatctatggcatcgtggccttcaacgagtggttcacctacttctacatggacgtgtggggcaacggcacccaagtgacagtctcttctggcggatcttctggacaagaacagctggtggaatctggtggcggagtggttcaacctggcggctctctgagactgagctgtctggcctccggcttcaccttccacaaatacggcatgcactgggtccgacaggcccctggaaaaggccttgaatgggtcgccctgatcagcgacgacggcatgagaaagtaccacagcgacagcatgtggggcagagtgaccatcagccgggacaacagcaagaacaccctgtacctgcagttcagctccctgaaggtggaagataccgccatgttcttttgcgccagagaagccggcggacccatctggcatgacgacgtgaagtactacgacttcaacgacggctactacaactaccactacatggacgtgtggggcaagggcaccaccgtgacagtttcttctgcaagcggaggctccggagataagacccacacatgtcctccatgtcctgctccagagctgctgggtggcccttccgtgtttctgttccctccaaagcctaaggacaccctgatgatcagcaggacccctgaagtgacctgcgtggtggtggatgtgtctcacgaggacccagaagtgaagttcaattggtacgtggacggcgtggaagtgcacaacgccaagaccaagcctagagaggaacagtacaacagcacctacagagtggtgtccgtgctgaccgtgctgcaccaggattggctgaacggcaaagagtacaagtgcaaggtgtccaacaaggccctgcccgctcctatcgagaaaaccatcagcaaggccaagggccagcctcgcgaacctcaagtctgtacactgcctcctagccgggacgagctgaccaagaatcaggtgtcactgagctgcgccgtgaagggcttttaccccagcgacattgccgtggaatgggagagcaatggccagccagagaacaactacaagacaacccctcctgtgctggacagcgacggctcatttttcctggtgtccaagctgacagtggacaagagcagatggcagcagggcaacgtgttcagctgcagcgtgatgcacgaggccctgcacaaccactacacccagaaaagcctgtctctgagccctggc

SEQ ID NO: 373 - DNA, 2175 bp, synthetic construct
  misc_feature 1..2175: note = _
  source 1..2175: mol_type = other DNA
gagatcgtgctgacacagagccctggcaccctgagcctgtctccaggcgagacagccatcatcagctgccggacaagccagtacggcagcctggcctggtatcagcagaggcctggacaggcccccagactcgtgatctacagcggcagcacaagagccgccggaatccccgatagattcagcggctccagatggggccctgactacaacctgaccatcagcaacctggaaagcggcgacttcggcgtgtactactgccagcagtacgagttcttcggccagggcaccaaggtgcaggtggacatcaagggcggatcttctggaagcgaactgacccaagatcctgccgtgtctgtggccctgaagcagaccgtgaccatcacctgtagaggcgacagcctgagaagccactacgccagctggtatcagaagaagcctggacaggctcccgtgctgctgttctacggcaagaacaacagacccagcggcatccccgatagattttctggcagcgccagcggcaatagagccagcctgacaattactggcgcccaggccgaagatgaggccgactactactgcagcagcagagacaagagcggcagcagactgtccgtttttggcggaggcaccaagctgaccgtgctgggaggcggaggatctggcggatctggaagtggcggcggtggatctgcttctggctctggcgaagttcggctggtggaatctggcggcggacttgtgaaacctggcggctctctgagactgagctgtagcgcctccggcttcgacttcgacaatgcctggatgacctgggtccgacagcctcctggaaaaggcctggaatgggtcggaagaatcacaggccctggcgaaggctggagtgtggattatgccgagagcgtgaagggcagattcaccatcagccgggacaacaccaagaacaccctgtacctggaaatgaacaacgtgcggaccgaggataccggctactacttctgtgcccggaccggcaagtactacgacttttggagcggctaccctcctggcgaggaatactttcaggattggggccagggcaccctggtcatcgtttcttctggcggatcttctggacaggttcagctggttcagtctggcggacagatgaagaaacccggcgagagcatgcggatcagctgtagagccagcggctacgagttcatcgactgcaccctgaactggatcagactggcccctggcaaaagacccgagtggatgggatggctgaagcctagaggcggagccgtgaattacgccagacctctgcagggcagagtgaccatgaccagggacgtgtacagcgataccgccttcctggaactgagaagcctgaccgtggatgataccgccgtgtacttctgcacccggggcaagaactgcgactacaactgggacttcgagcactggggcagaggcacacctgtgatcgttagctctgcaagcggaggctccggagataagacccacacatgtcctccatgtcctgctccagaactgctgggcggaccttccgtgtttctgttccctccaaagcctaaggacaccctgatgatcagcaggacccctgaagtgacctgcgtggtggtggatgtgtctcacgaggacccagaagtgaagttcaattggtacgtggacggcgtggaagtgcacaacgccaagaccaagcctagagaggaacagtacaacagcacctacagagtggtgtccgtgctgacagtgctgcaccaggattggctgaacggcaaagagtacaagtgcaaggtgtccaacaaggccctgcccgcccctatcgagaaaaccatcagcaaggccaagggccagcctagggaaccccaggtttacacccttcctccatgccgggatgagctgaccaagaaccaggtgtccctgtggtgtctggtcaagggcttctaccccagcgacattgccgtggaatgggagagcaatggccagcctgagaacaactacaagaccacacctcctgtgctggactccgacggatcattcttcctgtacagcaagctgactgtggacaagagcagatggcagcagggcaacgtgttcagctgcagcgtgatgcacgaggccctgcacaaccactacacacagaagtccctgtctctgagccctggc

SEQ ID NO: 374 - DNA, 2175 bp, synthetic construct
  misc_feature 1..2175: note = _
  source 1..2175: mol_type = other DNA
agcgaactgacccaagatcctgccgtgtctgtggccctgaagcagaccgtgaccatcacctgtagaggcgacagcctgagaagccactacgccagctggtatcagaagaagcctggacaggctcccgtgctgctgttctacggcaagaacaacagacccagcggcatccccgatagattttctggcagcgccagcggcaatagagccagcctgacaattactggcgcccaggccgaagatgaggccgactactactgcagcagcagagacaagagcggcagcagactgtccgtttttggcggaggcaccaagctgaccgtgctgggcggatcttctggagagatcgtgctgacacagagccctggcaccctgagcctgtctccaggcgagacagccatcatcagctgccggacaagccagtacggcagcctggcctggtatcagcagaggcctggacaggcccccagactcgtgatctacagcggcagcacaagagccgccggaatccccgatagattcagcggctccagatggggccctgactacaacctgaccatcagcaacctggaaagcggcgacttcggcgtgtactactgccagcagtacgagttcttcggccagggcaccaaggtgcaggtggacatcaagggaggcggaggatctggcggatctggaagtggcggcggtggatctgcttctggctctggccaggttcagctggttcagtctggcggacagatgaagaaacccggcgagagcatgcggatcagctgtagagccagcggctacgagttcatcgactgcaccctgaactggatcagactggcccctggcaaaagacccgagtggatgggatggctgaagcctagaggcggagccgtgaattacgccagacctctgcagggcagagtgaccatgaccagggacgtgtacagcgataccgccttcctggaactgagaagcctgaccgtggatgataccgccgtgtacttctgcacccggggcaagaactgcgactacaactgggacttcgagcactggggcagaggcacacctgtgatcgttagctctggcggatcttctggagaagttcggctggtggaatctggcggcggacttgtgaaacctggcggctctctgagactgagctgtagcgcctccggcttcgacttcgacaatgcctggatgacctgggtccgacagcctcctggaaaaggcctggaatgggtcggaagaatcacaggccctggcgaaggctggagtgtggattatgccgagagcgtgaagggcagattcaccatcagccgggacaacaccaagaacaccctgtacctggaaatgaacaacgtgcggaccgaggataccggctactacttctgtgcccggaccggcaagtactacgacttttggagcggctaccctcctggcgaggaatactttcaggattggggccagggcaccctggtcatcgtttcttctgcaagcggaggctccggagataagacccacacatgtcctccatgtcctgctccagaactgctgggcggaccttccgtgtttctgttccctccaaagcctaaggacaccctgatgatcagcaggacccctgaagtgacctgcgtggtggtggatgtgtctcacgaggacccagaagtgaagttcaattggtacgtggacggcgtggaagtgcacaacgccaagaccaagcctagagaggaacagtacaacagcacctacagagtggtgtccgtgctgacagtgctgcaccaggattggctgaacggcaaagagtacaagtgcaaggtgtccaacaaggccctgcccgcccctatcgagaaaaccatcagcaaggccaagggccagcctagggaaccccaggtttacacccttcctccatgccgggatgagctgaccaagaaccaggtgtccctgtggtgtctggtcaagggcttctaccccagcgacattgccgtggaatgggagagcaatggccagcctgagaacaactacaagaccacacctcctgtgctggactccgacggatcattcttcctgtacagcaagctgactgtggacaagagcagatggcagcagggcaacgtgttcagctgcagcgtgatgcacgaggccctgcacaaccactacacacagaagtccctgtctctgagccctggc

SEQ ID NO: 375 - protein, 226 aa, synthetic construct
  REGION 1..226: note = _
DKTHTCPPCPAPEAAGGPSVFLFPPKPKDTLMISRTPEVTCVVVDVSHEDPEVKFNWYVDGVEVHNAKTKPREEQYNSTYRVVSVLTVLHQDWLNGKEYKCKVSNKALAAPIEKTISKAKGQPREPQVCTLPPSRDELTKNQVSLSCAVKGFYPSDIAVEWESNGQPENNYKTTPPVLDSDGSFFLVSKLTVDKSRWQQGNVFSCSVMHEALHNHYTQKSLSLSPG

SEQ ID NO: 376 - protein, 226 aa, synthetic construct
  REGION 1..226: note = _
DKTHTCPPCPAPEAAGGPSVFLFPPKPKDTLMISRTPEVTCVVVDVSHEDPEVKFNWYVDGVEVHNAKTKPREEQYNSTYRVVSVLTVLHQDWLNGKEYKCKVSNKALAAPIEKTISKAKGQPREPQVYTLPPCRDELTKNQVSLWCLVKGFYPSDIAVEWESNGQPENNYKTTPPVLDSDGSFFLYSKLTVDKSRWQQGNVFSCSVMHEALHNHYTQKSLSLSPG

SEQ ID NO: 377 - protein, 226 aa, synthetic construct
  REGION 1..226: note = _
DTTHTCPPCPAPEAAGGPSVFLFPPKPKDTLMISRTPEVTCVVVDVSHEDPEVKFNWYVDGVEVHNAKTKPREEQYNSTYRVVSVLTVLHQDWLNGKEYKCKVSNKALAAPIEKTISKAKGQPREPQVCTLPPSRDELTKNQVSLSCAVKGFYPSDIAVEWESNGQPENNYKTTPPVLDSDGSFFLVSKLTVDKSRWQQGNVFSCSVMHEALHNHYTQKSLSLSPG

SEQ ID NO: 378 - protein, 226 aa, synthetic construct
  REGION 1..226: note = _
DTTHTCPPCPAPEAAGGPSVFLFPPKPKDTLMISRTPEVTCVVVDVSHEDPEVKFNWYVDGVEVHNAKTKPREEQYNSTYRVVSVLTVLHQDWLNGKEYKCKVSNKALAAPIEKTISKAKGQPREPQVYTLPPCRDELTKNQVSLWCLVKGFYPSDIAVEWESNGQPENNYKTTPPVLDSDGSFFLYSKLTVDKSRWQQGNVFSCSVMHEALHNHYTQKSLSLSPG

SEQ ID NO: 379 - protein, 226 aa, synthetic construct
  REGION 1..226: note = _
DKTHTCPPCPAPEAAGGPSVFLFPPKPKDTLMISRTPEVTCVVVDVSHEDPEVKFNWYVDGVEVHNAKTKPREEQYNSTYRVVSVLTVLHQDWLNGKEYKCKVSNKALAAPIEKTISKAKGQPREPQVYTLPPSRDELTKNQVSLTCLVKGFYPSDIAVEWESNGQPENNYKTTPPVLDSDGSFFLYSKLTVDKSRWQQGNVFSCSVMHEALHNHYTQKSLSLSPG

SEQ ID NO: 380 - protein, 222 aa, synthetic construct
  REGION 1..222: note = _
TCPPCPAPEAAGGPSVFLFPPKPKDTLMISRTPEVTCVVVDVSHEDPEVKFNWYVDGVEVHNAKTKPREEQYNSTYRVVSVLTVLHQDWLNGKEYKCKVSNKALAAPIEKTISKAKGQPREPQVYTLPPSRDELTKNQVSLTCLVKGFYPSDIAVEWESNGQPENNYKTTPPVLDSDGSFFLYSKLTVDKSRWQQGNVFSCSVMHEALHNHYTQKSLSLSPG

SEQ ID NO: 381 - protein, 106 aa, synthetic construct [sequence omitted]

SEQ ID NO: 382 - protein, 120 aa, synthetic construct
  REGION 1..120: note = _
CPPCPAPEAAGGPSGQPREPQVYTLPPSRDELTKNQVSLTCLVKGFYPSDIAVEWESNGQPENNYKTTPPVLDSDGSFFLYSKLTVDKSRWQQGNVFSCSVMHEALHNHYTQKSLSLSPG

SEQ ID NO: 383 - protein, 125 aa, synthetic construct
  REGION 1..125: note = _
DKTHTCPPCPAPEAAGGPSGQPREPQVYTLPPSRDELTKNQVSLTCLVKGFYPSDIAVEWESNGQPENNYKTTPPVLDSDGSFFLYSKLTVDKSRWQQGNVFSCSVMHEALHNHYTQKSLSLSPG

SEQ ID NO: 384 - protein, 106 aa, synthetic construct
  REGION 1..106: note = _
GQPREPQVYTLPPCRDELTKNQVSLTCLVKGFYPSDIAVEWESNGQPENNYKTTPPVLDSDGSFFLYSKLTVDKSRWQQGNVFSCSVMHEALHNHYTQKSLSLSPG

SEQ ID NO: 385 - protein, 106 aa, synthetic construct
  REGION 1..106: note = _
GQPREPQVCTLPPSRDELTKNQVSLTCLVKGFYPSDIAVEWESNGQPENNYKTTPPVLDSDGSFFLYSKLTVDKSRWQQGNVFSCSVMHEALHNHYTQKSLSLSPG

SEQ ID NO: 386 - protein, 226 aa, synthetic construct
  REGION 1..226: note = _
DKTHTCPPCPAPELLGGPSVFLFPPKPKDTLMISRTPEVTCVVVDVSHEDPEVKFNWYVDGVEVHNAKTKPREEQYNSTYRVVSVLTVLHQDWLNGKEYKCKVSNKALPAPIEKTISKAKGQPREPQVCTLPPSRDELTKNQVSLSCAVKGFYPSDIAVEWESNGQPENNYKTTPPVLDSDGSFFLVSKLTVDKSRWQQGNVFSCSVMHEALHNHYTQKSLSLSPG

SEQ ID NO: 387 - protein, 226 aa, synthetic construct
  REGION 1..226: note = _
DKTHTCPPCPAPELLGGPSVFLFPPKPKDTLMISRTPEVTCVVVDVSHEDPEVKFNWYVDGVEVHNAKTKPREEQYNSTYRVVSVLTVLHQDWLNGKEYKCKVSNKALPAPIEKTISKAKGQPREPQVYTLPPCRDELTKNQVSLWCLVKGFYPSDIAVEWESNGQPENNYKTTPPVLDSDGSFFLYSKLTVDKSRWQQGNVFSCSVMHEALHNHYTQKSLSLSPG

SEQ ID NO: 388 - protein, 227 aa, synthetic construct
  REGION 1..227: note = _
DKTHTCPPCPAPELLGGPSVFLFPPKPKDTLMISRTPEVTCVVVDVSHEDPEVKFNWYVDGVEVHNAKTKPREEQYNSTYRVVSVLTVLHQDWLNGKEYKCKVSNKALPAPIEKTISKAKGQPREPQVYTLPPSRDELTKNQVSLTCLVKGFYPSDIAVEWESNGQPENNYKTTPPVLDSDGSFFLYSKLTVDKSRWQQGNVFSCSVMHEALHNHYTQKSLSLSPGK

SEQ ID NO: 389 - protein, 112 aa, synthetic construct
  REGION 1..112: note = _
ASTKGPSVFPLAPSSKSTSGGTAALGCLVKDYFPEPVTVSWNSGALTSGVHTFPAVLQSSGLYSLSSVVTVPSSSLGTQTYICNVNHKPSNTKVDKKVEPKSCDKTHTCPPC

SEQ ID NO: 390 - protein, 103 aa, synthetic construct
  REGION 1..103: note = _
ASTKGPSVFPLAPSSKSTSGGTAALGCLVKDYFPEPVTVSWNSGALTSGVHTFPAVLQSSGLYSLSSVVTVPSSSLGTQTYICNVNHKPSNTKVDKKVEPKSS

SEQ ID NO: 391 - protein, 105 aa, synthetic construct
  REGION 1..105: note = _
ASTKGPSVFPLAPSSKSTSGGTAALGCLVKDYFPEPVTVSWNSGALTSGVHTFPAVLQSSGLYSLSSVVTVPSSSLGTQTYICNVNHKPSNTKVDKKVEPKTPLG

SEQ ID NO: 392 - protein, 103 aa, synthetic construct
  REGION 1..103: note = _
ASTKGPSVFPLAPSSKSTSGGTAALGCLVKDYFPEPVTVSWNSGALTSGVHTFPAVLQSSGLYSLSSVVTVPSSSLGTQTYICNVNHKPSNTKVDKKVEPKSC

SEQ ID NO: 393 - protein, 115 aa, synthetic construct
  REGION 1..115: note = _
ASTKGPSVFPLAPSSKSTSGGTAALGCLVKDYFPEPVTVSWNSGALTSGVHTFPAVLQSSGLYSLSSVVTVPSSSLGTQTYICNVNHKPSNTKVDKKVEPKTPLGDTTHTCPPCP

SEQ ID NO: 394 - protein, 120 aa, synthetic construct
  REGION 1..120: note = _
DKTHTCPPCPAPEAAGGPSVFLFPPKPKDTLMISRTPEVTCVVVDVSHEDPEVKFNWYVDGVEVHNAKTKPREEQYNSTYRVVSVLTVLHQDWLNGKEYKCKVSNKALAAPIEKTISKAK

SEQ ID NO: 395 - protein, 120 aa, synthetic construct
  REGION 1..120: note = _
DTTHTCPPCPAPEAAGGPSVFLFPPKPKDTLMISRTPEVTCVVVDVSHEDPEVKFNWYVDGVEVHNAKTKPREEQYNSTYRVVSVLTVLHQDWLNGKEYKCKVSNKALAAPIEKTISKAK

SEQ ID NO: 396 - protein, 116 aa, synthetic construct
  REGION 1..116: note = _
TCPPCPAPEAAGGPSVFLFPPKPKDTLMISRTPEVTCVVVDVSHEDPEVKFNWYVDGVEVHNAKTKPREEQYNSTYRVVSVLTVLHQDWLNGKEYKCKVSNKALAAPIEKTISKAK

SEQ ID NO: 397 - protein, 14 aa, synthetic construct
  REGION 1..14: note = _
CPPCPAPEAAGGPS

SEQ ID NO: 398 - protein, 19 aa, synthetic construct
  REGION 1..19: note = _
DKTHTCPPCPAPEAAGGPS

SEQ ID NO: 399 - protein, 120 aa, synthetic construct
  REGION 1..120: note = _
DKTHTCPPCPAPELLGGPSVFLFPPKPKDTLMISRTPEVTCVVVDVSHEDPEVKFNWYVDGVEVHNAKTKPREEQYNSTYRVVSVLTVLHQDWLNGKEYKCKVSNKALPAPIEKTISKAK

SEQ ID NO: 400 - protein, 106 aa, synthetic construct [sequence omitted]

SEQ ID NO: 401 - protein, 120 aa, synthetic construct; identical to SEQ ID NO: 382
  REGION 1..120: note = _

SEQ ID NO: 402 - protein, 106 aa, synthetic construct; identical to SEQ ID NO: 385
  REGION 1..106: note = _

SEQ ID NO: 403 - protein, 106 aa, synthetic construct; identical to SEQ ID NO: 384
  REGION 1..106: note = _

SEQ ID NO: 404 - protein, 107 aa, synthetic construct [sequence omitted]

SEQ ID NO: 405 - protein, 116 aa, synthetic construct
  REGION 1..116: note = _
RTVAAPSVFIFPPSDEQLKSGTASVVCLLNNFYPREAKVQWKVDNALQSGNSQESVTEQDSKDSTYSLSSTLTLSKADYEKHKVYACEVTHQGLSSPVTKSFNRGECDKTHTCPPC

SEQ ID NO: 406 - protein, 9 aa, synthetic construct
  REGION 1..9: note = _
GILGFVFTL

SEQ ID NO: 407 - protein, 14 aa, synthetic construct
  REGION 1..14: note = _
PKYVKFQNTLKLAT

SEQ ID NO: 408 - protein, 9 aa, synthetic construct
  REGION 1..9: note = _
SRYWAIRTR

SEQ ID NO: 409 - protein, 9 aa, synthetic construct
  REGION 1..9: note = _
CTELKLSDY

SEQ ID NO: 410 - protein, 9 aa, synthetic construct
  REGION 1..9: note = _
ELRSRYWAI

SEQ ID NO: 411 - protein, 9 aa, synthetic construct
  REGION 1..9: note = _
ILRGSVAHK

SEQ ID NO: 412 - protein, 9 aa, synthetic construct
  REGION 1..9: note = _
VSDGGPNLY

SEQ ID NO: 413 - protein, 9 aa, synthetic construct
  REGION 1..9: note = _
FMYSEFHFI

SEQ ID NO: 414 - protein, 9 aa, synthetic construct
  REGION 1..9: note = _
AIMDKNIIL

SEQ ID NO: 415 - protein, 9 aa, synthetic construct
  REGION 1..9: note = _
NMLSTVLGV

SEQ ID NO: 416 - protein, 9 aa, synthetic construct
  REGION 1..9: note = _
FLKDVMESM

SEQ ID NO: 417 - protein, 9 aa, synthetic construct
  REGION 1..9: note = _
LPFEKSTVM

SEQ ID NO: 418 - protein, 9 aa, synthetic construct
  REGION 1..9: note = _
FVRQCFNPM

SEQ ID NO: 419 - protein, 10 aa, synthetic construct
  REGION 1..10: note = _
KLGEFYNQMM

SEQ ID NO: 420 - protein, 15 aa, synthetic construct
  REGION 1..15: note = _
AVLLSNEGIINSEDE

SEQ ID NO: 421 - protein, 16 aa, synthetic construct
  REGION 1..16: note = _
AVLLSNEGIINSEDEH

SEQ ID NO: 422 - protein, 8 aa, synthetic construct
  REGION 1..8: note = _
AYDQSGRL

SEQ ID NO: 423 - protein, 9 aa, synthetic construct
  REGION 1..9: note = _
AYDQSGRLV

SEQ ID NO: 424 - protein, 10 aa, synthetic construct
  REGION 1..10: note = _
FPIMHDRTKI

SEQ ID NO: 425 - protein, 15 aa, synthetic construct
  REGION 1..15: note = _
ITKNLNSLSELEVKN

SEQ ID NO: 426 - protein, 17 aa, synthetic construct
  REGION 1..17: note = _
ITKNLNSLSELEVKNLQ

SEQ ID NO: 427 - protein, 16 aa, synthetic construct
  REGION 1..16: note = _
LAVLLSNEGIINSEDE

SEQ ID NO: 428 - protein, 17 aa, synthetic construct
  REGION 1..17: note = _
LAVLLSNEGIINSEDEH

SEQ ID NO: 429 - protein, 9 aa, synthetic construct
  REGION 1..9: note = _
LPQSGRIVV

SEQ ID NO: 430 - protein, 9 aa, synthetic construct
  REGION 1..9: note = _
SYIGSINNI

SEQ ID NO: 431 - protein, 9 aa, synthetic construct
  REGION 1..9: note = _
NAITNAKII

SEQ ID NO: 432 - protein, 9 aa, synthetic construct
  REGION 1..9: note = _
KYKNAVTEL

SEQ ID NO: 433 - protein, 24 aa, synthetic construct
  REGION 1..24: note = _
NSELLSLINDMPITNDQKKLMSNN

SEQ ID NO: 434 - protein, 9 aa, synthetic construct
  REGION 1..9: note = _
NPKASLLSL

SEQ ID NO: 435 - protein, 9 aa, synthetic construct
  REGION 1..9: note = _
VYNTVISYI

SEQ ID NO: 436 - protein, 10 aa, synthetic construct
  REGION 1..10: note = _
TYMLTNSELL

SEQ ID NO: 437 - protein, 13 aa, synthetic construct
  REGION 1..13: note = _
WAICKRIPNKKPG

SEQ ID NO: 438 - protein, 11 aa, synthetic construct
  REGION 1..11: note = _
KNRGIIKTFSN

SEQ ID NO: 439 - protein, 6 aa, synthetic construct
  REGION 1..6: note = _
TLNPTI

SEQ ID NO: 440 - protein, 12 aa, synthetic construct
  REGION 1..12: note = _
ATLVVNRIRGGF

SEQ ID NO: 441 - protein, 6 aa, synthetic construct
  REGION 1..6: note = _
LNPTIA

SEQ ID NO: 442 - protein, 12 aa, synthetic construct
  REGION 1..12: note = _
SANNDAEIGNLI

SEQ ID NO: 443 - protein, 16 aa, synthetic construct
  REGION 1..16: note = _
PETISDPENRNKPSAE

SEQ ID NO: 444 - protein, 6 aa, synthetic construct
  REGION 1..6: note = _
AEGQLG

SEQ ID NO: 445 - protein, 9 aa, synthetic construct
  REGION 1..9: note = _
ARKLLLDNL

SEQ ID NO: 446 - protein, 9 aa, synthetic construct
  REGION 1..9: note = _
ASFVNPIYL

SEQ ID NO: 447 - protein, 12 aa, synthetic construct
  REGION 1..12: note = _
DVVDGMNFNRGY

SEQ ID NO: 448 - protein, 9 aa, synthetic construct
  REGION 1..9: note = _
NMFTPYIGV

SEQ ID NO: 449 - protein, 24 aa, synthetic construct
  REGION 1..24: note = _
NLVGLIGVKGSSIAADQLPNVGIT

SEQ ID NO: 450 - protein, 10 aa, synthetic construct
  REGION 1..10: note = _
SGPSNTPPEI

SEQ ID NO: 451 - protein, 9 aa, synthetic construct
  REGION 1..9: note = _
TDLGQNLLY

SEQ ID NO: 452 - protein, 10 aa, synthetic construct
  REGION 1..10: note = _
LTDLGQNLLY

SEQ ID NO: 453 - protein, 9 aa, synthetic construct
  REGION 1..9: note = _
FALSNAEDL

SEQ ID NO: 454 - protein, 15 aa, synthetic construct
  REGION 1..15: note = _
DEPTLLYVLFEVFDV

SEQ ID NO: 455 - protein, 9 aa, synthetic construct
  REGION 1..9: note = _
KYSPSNVKI

SEQ ID NO: 456 - protein, 9 aa, synthetic construct
  REGION 1..9: note = _
MPNRNYIAF

SEQ ID NO: 457 - protein, 15 aa, synthetic construct
  REGION 1..15: note = _
VDCYINLGARWSLDY

SEQ ID NO: 458 - protein, 9 aa, synthetic construct
  REGION 1..9: note = _
VNIRNCCYI

SEQ ID NO: 459 - protein, 30 aa, synthetic construct
  REGION 1..30: note = _
RNFQPMSRQVVDDTKYKDYQQVGILHQHNN

SEQ ID NO: 460 - protein, 9 aa, synthetic construct
  REGION 1..9: note = _
LPKLTPFAL

SEQ ID NO: 461 - protein, 15 aa, synthetic construct
  REGION 1..15: note = _
FQRPTISSNSHAIFR

SEQ ID NO: 462 - protein, 10 aa, synthetic construct
  REGION 1..10: note = _
SGPSNTPPEI

SEQ ID NO: 463 - protein, 9 aa, synthetic construct
  REGION 1..9: note = _
TDLGQNLLY

SEQ ID NO: 464 - protein, 10 aa, synthetic construct
  REGION 1..10: note = _
LTDLGQNLLY

SEQ ID NO: 465 - protein, 9 aa, synthetic construct
  REGION 1..9: note = _
FALSNAEDL

SEQ ID NO: 466 - protein, 15 aa, synthetic construct
  REGION 1..15: note = _
DEPTLLYVLFEVFDV

SEQ ID NO: 467 - protein, 9 aa, synthetic construct
  REGION 1..9: note = _
KYSPSNVKI

SEQ ID NO: 468 - protein, 10 aa, synthetic construct
  REGION 1..10: note = _
MPNRPNYIAF

SEQ ID NO: 469 - protein, 15 aa, synthetic construct
  REGION 1..15: note = _
VDCYINLGARWSLDY

SEQ ID NO: 470 - protein, 9 aa, synthetic construct
  REGION 1..9: note = _
LPKLTPFAL

SEQ ID NO: 471 - protein, 15 aa, synthetic construct
  REGION 1..15: note = _
FQRPTISSNSHAIFR

SEQ ID NO: 472 - protein, 21 aa, synthetic construct
  REGION 1..21: note = _
GKYTTETFATNSYTPSYIAQE

SEQ ID NO: 473 - protein, 10 aa, synthetic construct
  REGION 1..10: note = _
DYDDYNIGTT

SEQ ID NO: 474 - protein, 9 aa, synthetic construct
  REGION 1..9: note = _
KISGVFPNP

SEQ ID NO: 475 - protein, 10 aa, synthetic construct
  REGION 1..10: note = _
PLAPKESMFN

SEQ ID NO: 476 - protein, 33 aa, synthetic construct
  REGION 1..33: note = _
ETLLIEDDVSGQGKELGVNLNPAGPITADEQGL

SEQ ID NO: 477 - protein, 9 aa, synthetic construct
  REGION 1..9: note = _
NLVPMVATV

SEQ ID NO: 478 - protein, 9 aa, synthetic construct
  REGION 1..9: note = _
GLCTLVAML

SEQ ID NO: 479 - protein, 10 aa, synthetic construct
  REGION 1..10: note = _
TPRVTGGGAM

SEQ ID NO: 480 - protein, 8 aa, synthetic construct
  REGION 1..8: note = _
SSIEFARL

SEQ ID NO: 481 - protein, 9 aa, synthetic construct
  REGION 1..9: note = _
CLGGLLTMV

SEQ ID NO: 482 - protein, 9 aa, synthetic construct
  REGION 1..9: note = _
FLRGRAYGL

SEQ ID NO: 483 - protein, 9 aa, synthetic construct
  REGION 1..9: note = _
TPHFMPTNL

SEQ ID NO: 484 - protein, 8 aa, synthetic construct
  REGION 1..8: note = _
RAKFKQLL

SEQ ID NO: 485 - protein, 9 aa, synthetic construct
  REGION 1..9: note = _
RPPIFIRRL

SEQ ID NO: 486 - protein, 9 aa, synthetic construct
  REGION 1..9: note = _
VLEETSVML

SEQ ID NO: 487 - protein, 9 aa, synthetic construct
  REGION 1..9: note = _
IVTDFSVIK

SEQ ID NO: 488 - protein, 9 aa, synthetic construct
  REGION 1..9: note = _
IPSINVHHY

SEQ ID NO: 489 - protein, 9 aa, synthetic construct
  REGION 1..9: note = _
QYDPVAALF

SEQ ID NO: 490 - protein, 11 aa, synthetic construct
  REGION 1..11: note = _
HPVGEADYFEY

SEQ ID NO: 491 - protein, 9 aa, synthetic construct
  REGION 1..9: note = _
VTEHDTLLY

SEQ ID NO: 492 - protein, 9 aa, synthetic construct
  REGION 1..9: note = _
HGIRNASFI

SEQ ID NO: 493 - protein, 10 aa, synthetic construct
  REGION 1..10: note = _
AVFDRKSDAK

SEQ ID NO: 494 - protein, 9 aa, synthetic construct
  REGION 1..9: note = _
TPLHEQHGM

SEQ ID NO: 495 - protein, 11 aa, synthetic construct
  REGION 1..11: note = _
YSEHPTFTSQY

SEQ ID NO: 496 - protein, 9 aa, synthetic construct
  REGION 1..9: note = _
YVLDHLIVV

SEQ ID NO: 497 - protein, 9 aa, synthetic construct
  REGION 1..9: note = _
YLLEMLWRL

SEQ ID NO: 498 - protein, 9 aa, synthetic construct
  REGION 1..9: note = _
FLYALALLL

SEQ ID NO: 499 - protein, 9 aa, synthetic construct
  REGION 1..9: note = _
QAKWRLQTL

SEQ ID NO: 500 - protein, 9 aa, synthetic construct
  REGION 1..9: note = _
ELRRKMMYM

SEQ ID NO: 501 - protein, 11 aa, synthetic construct
  REGION 1..11: note = _
RPHERNGFTVL

SEQ ID NO: 502 - protein, 8 aa, synthetic construct
  REGION 1..8: note = _
SSIEFARL

SEQ ID NO: 503 - protein, 8 aa, synthetic construct
  REGION 1..8: note = _
QTFDRGRL

SEQ ID NO: 504 - protein, 16 aa, synthetic construct
  REGION 1..16: note = _
SLKMADPNRFRGKDLP

SEQ ID NO: 505 - protein, 34 aa, synthetic construct
  REGION 1..34: note = _
QPPSLPITVYYAVLERACTSVLLNAPSEAPQIVR

SEQ ID NO: 506 - protein, 9 aa, synthetic construct
  REGION 1..9: note = _
RLNELLAYV

SEQ ID NO: 507 - protein, 9 aa, synthetic construct
  REGION 1..9: note = _
RMLGDVMAV

SEQ ID NO: 508 - protein, 23 aa, synthetic construct
  REGION 1..23: note = _
KYALADASLKMADPNRFRGKDLP

SEQ ID NO: 509 - protein, 9 aa, synthetic construct
  REGION 1..9: note = _
SLPITVTTA

SEQ ID NO: 510 - protein, 8 aa, synthetic construct
  REGION 1..8: note = _
DPEDSALL

SEQ ID NO: 511 - protein, 9 aa, synthetic construct
  REGION 1..9: note = _
DYATLGVGV

SEQ ID NO: 512 - protein, 9 aa, synthetic construct
  REGION 1..9: note = _
RPRGEVRFL

SEQ ID NO: 513 - protein, 8 aa, synthetic construct
  REGION 1..8: note = _
SSIEFARL

SEQ ID NO: 514 - protein, 15 aa, synthetic construct
  REGION 1..15: note = _
EEVDMTPADALDDFD

SEQ ID NO: 515 - protein, 9 aa, synthetic construct
  REGION 1..9: note = _
GLADTVVAC

SEQ ID NO: 516 - protein, 9 aa, synthetic construct
  REGION 1..9: note = _
ASDSLNNEY

SEQ ID NO: 517 - protein, 13 aa, synthetic construct
  REGION 1..13: note = _
DFEFEQMFTDAMG

SEQ ID NO: 518 - protein, 10 aa, synthetic construct
  REGION 1..10: note = _
EVDMTPADAL

SEQ ID NO: 519 - protein, 18 aa, synthetic construct
  REGION 1..18: note = _
PEEFEGAGDGEPPEDDDS

SEQ ID NO: 520 - protein, 9 aa, synthetic construct
  REGION 1..9: note = _
FLWEDQTLL

SEQ ID NO: 521 - protein, 10 aa, synthetic construct
  REGION 1..10: note = _
FLVDAIVRVA

SEQ ID NO: 522 - protein, 20 aa, synthetic construct
  REGION 1..20: note = _
GPADAPPGSPAPPPPEHRGG

SEQ ID NO: 523 - protein, 9 aa, synthetic construct
  REGION 1..9: note = _
GPHETITAL

SEQ ID NO: 524 - protein, 23 aa, synthetic construct
  REGION 1..23: note = _
KYALADPSLKMADPNRFRGKNLP

SEQ ID NO: 525 - protein, 11 aa, synthetic construct
  REGION 1..11: note = _
NNYGSTIEGLL

SEQ ID NO: 526 - protein, 20 aa, synthetic construct
  REGION 1..20: note = _
PEEFEGAGDGEPPEDDDSAT

SEQ ID NO: 527 - protein, 20 aa, synthetic construct
  REGION 1..20: note = _
PPLYATGRLSQAQLMPSPPM

SEQ ID NO: 528 - protein, 12 aa, synthetic construct
  REGION 1..12: note = _
TQPELVPEDPED

SEQ ID NO: 529 - protein, 15 aa, synthetic construct
  REGION 1..15: note = _
YTSTLLPPELSDTTN

SEQ ID NO: 530 - protein, 20 aa, synthetic construct
  REGION 1..20: note = _
DPSLKMADPNRFRGKNLPVL

SEQ ID NO: 531 - protein, 20 aa, synthetic construct
  REGION 1..20: note = _
PELVPEDPEDSALLEDPAGT

SEQ ID NO: 532 - protein, 9 aa, synthetic construct
  REGION 1..9: note = _
HGPSLYRTF

SEQ ID NO: 533 - protein, 13 aa, synthetic construct
  REGION 1..13: note = _
NKRVFCAAVGRLA

SEQ ID NO: 534 - protein, 13 aa, synthetic construct
  REGION 1..13: note = _
PMRARPRGEVRFL

SEQ ID NO: 535 - protein, 9 aa, synthetic construct
  REGION 1..9: note = _
VFCAAVGRL

SEQ ID NO: 536 - protein, 15 aa, synthetic construct
  REGION 1..15: note = _
LGNRLCGPATAAWAG

SEQ ID NO: 537 - protein, 9 aa, synthetic construct
  REGION 1..9: note = _
NLVPMVATV

SEQ ID NO: 538 - protein, 9 aa, synthetic construct
  REGION 1..9: note = _
TMYGGISLL

SEQ ID NO: 539 - protein, 9 aa, synthetic construct
  REGION 1..9: note = _
VLEETSVML

SEQ ID NO: 540 - protein, 10 aa, synthetic construct
  REGION 1..10: note = _
LDPHAFHLLL

SEQ ID NO: 541 - protein, 9 aa, synthetic construct
  REGION 1..9: note = _
RIFAELEGV

SEQ ID NO: 542 - protein, 11 aa, synthetic construct
  REGION 1..11: note = _
RPHERNGFTVL

SEQ ID NO: 543 - protein, 9 aa, synthetic construct
  REGION 1..9: note = _
VFPTKDVAL

SEQ ID NO: 544 - protein, 9 aa, synthetic construct
  REGION 1..9: note = _
VLAELVKQI

SEQ ID NO: 545 - protein, 9 aa, synthetic construct
  REGION 1..9: note = _
VLPHETRLL

SEQ ID NO: 546 - protein, 13 aa, synthetic construct
  REGION 1..13: note = _
KRLDVCRAKMGYM

SEQ ID NO: 547 - protein, 18 aa, synthetic construct
  REGION 1..18: note = _
GGGAMAGASTSAGRKRKS

SEQ ID NO: 548 - protein, 9 aa, synthetic construct
  REGION 1..9: note = _
AALFFFDID

SEQ ID NO: 549 - protein, 15 aa, synthetic construct
  REGION 1..15: note = _
AGILARNLVPMVATV

SEQ ID NO: 550 - protein, 10 aa, synthetic construct
  REGION 1..10: note = _
ALFFFDIDLL

SEQ ID NO: 551 - protein, 15 aa, synthetic construct
  REGION 1..15: note = _
ANETIYNTTLKYGDV

SEQ ID NO: 552 - protein, 15 aa, synthetic construct
  REGION 1..15: note = _
ARAKKDELRRKMMYM

SEQ ID NO: 553 - protein, 15 aa, synthetic construct
  REGION 1..15: note = _
ARNLVPMVATVQGQN

SEQ ID NO: 554 - protein, 20 aa, synthetic construct
  REGION 1..20: note = _
ASTAAPPYTNEQAYQMLLAL

SEQ ID NO: 555 - protein, 9 aa, synthetic construct
  REGION 1..9: note = _
AVGGAVASV

SEQ ID NO: 556 - protein, 10 aa, synthetic construct
  REGION 1..10: note = _
DEEEAIVAYT

SEQ ID NO: 557 - protein, 11 aa, synthetic construct
  REGION 1..11: note = _
DEEEAIVAYTL

SEQ ID NO: 558 - protein, 9 aa, synthetic construct
  REGION 1..9: note = _
DPVAALFFF

SEQ ID NO: 559 - protein, 9 aa, synthetic construct
  REGION 1..9: note = _
EEAIVAYTL

SEQ ID NO: 560 - protein, 18 aa, synthetic construct
  REGION 1..18: note = _
EECQLPSLKIFIAGNSAY

SEQ ID NO: 561 - protein, 10 aa, synthetic construct
  REGION 1..10: note = _
EEEAIVAYTL

SEQ ID NO: 562 - protein, 8 aa, synthetic construct
  REGION 1..8: note = _
TSYKFESV

SEQ ID NO: 563 - protein, 8 aa, synthetic construct
  REGION 1..8: note = _
ITYRFYLI

SEQ ID NO: 564 - protein, 9 aa, synthetic construct
  REGION 1..9: note = _
ILDDNLYKV

SEQ ID NO: 565 - protein, 9 aa, synthetic construct
  REGION 1..9: note = _
KVDDTFYYV

SEQ ID NO: 566 - protein, 9 aa, synthetic construct
  REGION 1..9: note = _
AAFEFINSL

SEQ ID NO: 567 - protein, 8 aa, synthetic construct
  REGION 1..8: note = _
KSYNYMLL

SEQ ID NO: 568 - protein, 9 aa, synthetic construct
  REGION 1..9: note = _
MPAYIRNTL

SEQ ID NO: 569 - protein, 9 aa, synthetic construct
  REGION 1..9: note = _
RVYEALYYV

SEQ ID NO: 570 - protein, 9 aa, synthetic construct
  REGION 1..9: note = _
IGMFNLTFI

SEQ ID NO: 571 - protein, 9 aa, synthetic construct
  REGION 1..9: note = _
SLSAYIIRV

SEQ ID NO: 572 - protein, 9 aa, synthetic construct
  REGION 1..9: note = _
LMYDIINSV

SEQ ID NO: 573 - protein, 9 aa, synthetic construct
  REGION 1..9: note = _
RLYDYFTRV

SEQ ID NO: 574 - protein, 10 aa, synthetic construct
  REGION 1..10: note = _
YSLPNAGDVI

SEQ ID NO: 575 - protein, 9 aa, synthetic construct
  REGION 1..9: note = _
YSQVNKRYI

SEQ ID NO: 576 - protein, 9 aa, synthetic construct
  REGION 1..9: note = _
VSLDYINTM

SEQ ID NO: 577 - protein, 9 aa, synthetic construct
  REGION 1..9: note = _
TLPEVISTI

SEQ ID NO: 578 - protein, 9 aa, synthetic construct
  REGION 1..9: note = _
FLTSVINRV

SEQ ID NO: 579 - protein, 9 aa, synthetic construct
  REGION 1..9: note = _
GFFDFVNFV

SEQ ID NO: 580 - protein, 9 aa, synthetic construct
  REGION 1..9: note = _
VLYDEFVTI

SEQ ID NO: 581 - protein, 9 aa, synthetic construct
  REGION 1..9: note = _
FPYEGGKVF

SEQ ID NO: 582 - protein, 9 aa, synthetic construct
  REGION 1..9: note = _
LMDENTYAM

SEQ ID NO: 583 - protein, 10 aa, synthetic construct
  REGION 1..10: note = _
NLFDIPLLTV

SEQ ID NO: 584 - protein, 9 aa, synthetic construct
  REGION 1..9: note = _
VGPSNSPTF

SEQ ID NO: 585 - protein, 9 aa, synthetic construct
  REGION 1..9: note = _
YAPVSPIVI

SEQ ID NO: 586 - protein, 9 aa, synthetic construct
  REGION 1..9: note = _
HVDGKILFV

SEQ ID NO: 587 - protein, 8 aa, synthetic construct
  REGION 1..8: note = _
AAFEFRDL

SEQ ID NO: 588 - protein, 8 aa, synthetic construct
  REGION 1..8: note = _
AIIKYTDL

SEQ ID NO: 589 - protein, 8 aa, synthetic construct
  REGION 1..8: note = _
AIYAFRLT

SEQ ID NO: 590 - protein, 9 aa, synthetic construct
  REGION 1..9: note = _
AIYGFGVTF

SEQ ID NO: 591 - protein, 9 aa, synthetic construct
  REGION 1..9: note = _
ANVDFMEYV

SEQ ID NO: 592 - protein, 8 aa, synthetic construct
  REGION 1..8: note = _
EQFSFSNV

SEQ ID NO: 593 - protein, 15 aa, synthetic construct
  REGION 1..15: note = _
TYTFGEHKQEKDLEY

SEQ ID NO: 594 - protein, 15 aa, synthetic construct
  REGION 1..15: note = _
TEDSHPPYKQTQPGA

SEQ ID NO: 595 - protein, 15 aa, synthetic construct
  REGION 1..15: note = _
PESRESLAWQTATNP

SEQ ID NO: 596 - protein, 10 aa, synthetic construct
  REGION 1..10: note = _
FGEHKQEKDL

SEQ ID NO: 597 - protein, 15 aa, synthetic construct
  REGION 1..15: note = _
AGGTGTEDSHPPYKQ

SEQ ID NO: 598 - protein, 10 aa, synthetic construct
  REGION 1..10: note = _
FGEHKQEKDL

SEQ ID NO: 599 - protein, 15 aa, synthetic construct
  REGION 1..15: note = _
AGGTGTEDSHPPYKQ

SEQ ID NO: 600 - protein, 15 aa, synthetic construct
  REGION 1..15: note = _
FGEHKQEKDLEYGAC

SEQ ID NO: 601 - protein, 15 aa, synthetic construct
  REGION 1..15: note = _
HYRAHARDGVFDYYT

SEQ ID NO: 602 - protein, 5 aa, synthetic construct
  REGION 1..5: note = _
KQEDK

SEQ ID NO: 603 - protein, 15 aa, synthetic construct
  REGION 1..15: note = _
GDPIADMIDQTVNNQ

SEQ ID NO: 604 - protein, 15 aa, synthetic construct
  REGION 1..15: note = _
YPTFGEHLQANDLDY

SEQ ID NO: 605 - protein, 9 aa, synthetic construct
  REGION 1..9: note = _
LEGTTNPNT

SEQ ID NO: 606 - protein, 16 aa, synthetic construct
  REGION 1..16: note = _
VSSHRLDDTGEVPALQ

SEQ ID NO: 607 - protein, 10 aa, synthetic construct
  REGION 1..10: note = _
RIYMRMKHVR

SEQ ID NO: 608 - protein, 10 aa, synthetic construct
  REGION 1..10: note = _
TSKSKYPLVV

SEQ ID NO: 609 - protein, 15 aa, synthetic construct
  REGION 1..15: note = _
DGYPTFGEHKQEKDL

SEQ ID NO: 610 - protein, 9 aa, synthetic construct
  REGION 1..9: note = _
YMYAVSGAL

SEQ ID NO: 611 - protein, 12 aa, synthetic construct
  REGION 1..12: note = _
FWRGDLVFDFQV

SEQ ID NO: 612 - protein, 23 aa, synthetic construct
  REGION 1..23: note = _
MNMSKQGIFQTVGSGLDHILSLA

SEQ ID NO: 613 - protein, 15 aa, synthetic construct
  REGION 1..15: note = _
TVSTEQNVPDPQVGI

SEQ ID NO: 614 - protein, 20 aa, synthetic construct
  REGION 1..20: note = _
ASICQMFCFWRGDLVFDFQV

SEQ ID NO: 615 - protein, 20 aa, synthetic construct
  REGION 1..20: note = _
DHMSIYKFMGRSHFLCTFTF

SEQ ID NO: 616 - protein, 20 aa, synthetic construct
  REGION 1..20: note = _
FPELKPGESTHTSDHMSIYK

SEQ ID NO: 617 - protein, 724 aa, synthetic construct
  REGION 1..724: note = _
DIVMTQTPLSLPVTPGEPASISCRSSKSLLHSNGITYLYWYLQKPGQSPQLLIYQMSNLVSGVPDRFSGSGSGTDFTLKISRVEAEDVGVYYCAQNLELPYTFGGGTKVEIKGGSGGDIVMTQTPLSLPVTPGEPASISCRSSKSLLHSNGITYLYWYLQKPGQSPQLLIYQMSNLVSGVPDRFSGSGSGTDFTLKISRVEAEDVGVYYCAQNLELPYTFGGGTKVEIKGSGGSAGSGSGGGGSASGSGQVQLVQSGAEVKKPGSSVKVSCKASGYAFSYSWINWVRQAPGQGLEWMGRIFPGDGDTDYNGKFKGRVTITADKSTSTAYMELSSLRSEDTAVYYCARNVFDGYWLVYWGQGTLVTVSSGGSGGQVQLVQSGAEVKKPGSSVKVSCKASGYAFSYSWINWVRQAPGQGLEWMGRIFPGDGDTDYNGKFKGRVTITADKSTSTAYMELSSLRSEDTAVYYCARNVFDGYWLVYWGQGTLVTVSSASGGSGDKTHTCPPCPAPEAAGGPSVFLFPPKPKDTLMISRTPEVTCVVVDVSHEDPEVKFNWYVDGVEVHNAKTKPREEQYNSTYRVVSVLTVLHQDWLNGKEYKCKVSNKALAAPIEKTISKAKGQPREPQVYTLPPCRDELTKNQVSLWCLVKGFYPSDIAVEWESNGQPENNYKTTPPVLDSDGSFFLYSKLTVDKSRWQQGNVFSCSVMHEALHNHYTQKSLSLSPG

SEQ ID NO: 618 - DNA, 2172 bp, synthetic construct
  misc_feature 1..2172: note = _
  source 1..2172: mol_type = other DNA
gacatcgtgatgacccagacacctctgagcctgcctgtgacacctggcgaacctgccagcatcagctgcagaagcagcaagagcctgctgcacagcaacggcatcacctacctgtactggtatctgcagaaacccggccagtctcctcagctgctgatctaccagatgagcaacctggtgtccggcgtgcccgatagattttctggcagcggctctggcaccgacttcaccctgaagattagcagagtggaagccgaggacgtgggcgtgtactactgtgcccagaacctggaactgccctacacctttggcggaggcaccaaggtggaaatcaagggcggatctggcggcgatattgtcatgactcagaccccactgtctctgcccgtgactccaggggaaccagcctccatctcttgcagatccagcaagtctctgctgcactctaatgggatcacatacctctattggtatctccaaaagcctgggcagagcccacagctcctcatctatcagatgtctaatctcgtgtctggggtgcccgacaggtttagcggttctggaagcggcacagatttcacactgaaaatctccagagtcgaggccgaagatgtgggagtctattattgcgcccagaatctcgagctgccttataccttcggaggcggaacaaaggtcgagatcaaaggttctggcggcagcgccggaagtggtagtggtggcggaggatctgcttctggctctggacaggttcagctggttcagtctggcgccgaagtgaagaaacctggcagcagcgtgaaggtgtcctgcaaggcctctggctacgccttcagctacagctggatcaactgggtccgacaggcccctggacaaggcttggaatggatgggcagaatcttccccggcgacggcgacaccgattacaacggcaagttcaagggcagagtgaccatcaccgccgacaagagcacaagcaccgcctacatggaactgagcagcctgagaagcgaggacaccgccgtgtactactgcgccagaaacgtgttcgacggctactggctggtgtattggggccagggaacactggtcacagtgtccagcggcggaagcggaggacaggttcaactggtgcaaagcggagctgaagtgaaaaagcccggctcctccgtgaaagtgtcttgtaaagccagcggctacgctttctcctactcctggattaactgggttcgccaagctccaggccagggccttgagtggatgggacgaatttttcctggcgacggggatacagactacaatgggaagttcaaaggccgggtcacaatcacagccgataagtccacctccacagcttatatggaactgtctagcctgcgctccgaggatacagccgtctattactgtgctcgcaatgtctttgatggctattggctcgtctactggggacagggcacactcgtgacagtgtcctctgcttctggcggctccggagataagacccacacatgtcctccatgtcctgctccagaagctgctggcggcccttctgtgttcctgtttcctccaaagcctaaggacaccctgatgatcagcagaacccctgaagtgacctgcgtggtggtggatgtgtctcacgaggaccccgaagtgaagttcaattggtacgtggacggcgtggaagtgcacaacgccaagaccaagcctagagaggaacagtacaacagcacctacagagtggtgtccgtgctgaccgtgctgcaccaggattggctgaacggcaaagagtacaagtgcaaggtgtccaacaaggccctggccgctcctatcgagaaaaccatcagcaaggccaagggccagcctagggaaccccaggtttacacccttcctccatgccgggatgagctgaccaagaaccaggtgtccctgtggtgtctcgtgaagggcttctaccccagcgacattgccgtggaatgggagagcaatggccagcctgagaacaactacaagacaacccctcctgtgctggacagcgacggctcattcttcctgtacagcaagctgacagtcgacaagtccagatggcagcagggcaacgtgttcagttgcagcgtgatgcacgaggccctgcacaaccactacacccagaagtccctgagcctgtctcctgga

SEQ ID NO: 619 - protein, 727 aa, synthetic construct
  REGION 1..727: note = _
QAVVTQEPSLTVSPGGTVTLTCGSSTGAVTTSNYANWVQEKPGQAFRGLIGGTNKRAPGTPARFSGSLLGGKAALTLSGAQPEDEAEYYCALWYSNLWVFGGGTKLTVLGGSGGDIVMTQTPLSLPVTPGEPASISCRSSKSLLHSNGITYLYWYLQKPGQSPQLLIYQMSNLVSGVPDRFSGSGSGTDFTLKISRVEAEDVGVYYCAQNLELPYTFGGGTKVEIKGSGGSAGSGSGGGGSASGSGQVQLVQSGAEVKKPGSSVKVSCKASGYAFSYSWINWVRQAPGQGLEWMGRIFPGDGDTDYNGKFKGRVTITADKSTSTAYMELSSLRSEDTAVYYCARNVFDGYWLVYWGQGTLVTVSSGGSGGEVQLLESGGGLVQPGGSLRLSCAASGFTFSTYAMNWVRQAPGKGLEWVSRIRSKYNNYATYYADSVKGRFTISRDDSKNTLYLQMNSLRAEDTAVYYCVRHGNFGNSYVSWFAYWGQGTLVTVSSASGGSGDKTHTCPPCPAPEAAGGPSVFLFPPKPKDTLMISRTPEVTCVVVDVSHEDPEVKFNWYVDGVEVHNAKTKPREEQYNSTYRVVSVLTVLHQDWLNGKEYKCKVSNKALAAPIEKTISKAKGQPREPQVCTLPPSRDELTKNQVSLSCAVKGFYPSDIAVEWESNGQPENNYKTTPPVLDSDGSFFLVSKLTVDKSRWQQGNVFSCSVMHEALHNHYTQKSLSLSPG

SEQ ID NO: 620 - DNA, 2181 bp, synthetic construct
  misc_feature 1..2181: note = _
  source 1..2181: mol_type = other DNA
caggccgtggttacacaagagccttctctgaccgtgtctcctggcggcacagtgacactgacatgtggcagttctacaggcgccgtgaccaccagcaattacgccaactgggtgcaagagaagccaggccaggccttcagaggactgatcggcggcacaaacaagagagcccctggaacaccagccagattcagcggatctctgctcggaggaaaggccgcactgacactgtctggtgcccagcctgaagatgaggccgagtactattgcgccctgtggtacagcaacctgtgggttttcggaggcggcaccaagctgacagtgcttggcggatctggcggcgacatcgtgatgacccagacacctctgagcctgcctgtgacacctggcgaacctgccagcatcagctgcagaagcagcaagagcctgctgcacagcaacggcatcacctacctgtactggtatctgcagaaacccggccagtctcctcagctgctgatctaccagatgagcaacctggtgtccggcgtgcccgatagattttctggcagcggctctggcaccgacttcaccctgaagattagcagagtggaagccgaggacgtgggcgtgtactactgtgcccagaacctggaactgccctacacctttggcggaggcaccaaggtggaaatcaaaggttctggcggcagcgccggaagtggtagtggtggcggaggatctgcttctggctctggacaggttcagctggttcagtctggcgccgaagtgaagaaacctggcagcagcgtgaaggtgtcctgcaaggcctctggctacgccttcagctacagctggatcaactgggtccgacaggcccctggacaaggcttggaatggatgggcagaatcttccccggcgacggcgacaccgattacaacggcaagttcaagggcagagtgaccatcaccgccgacaagagcacaagcaccgcctacatggaactgagcagcctgagaagcgaggacaccgccgtgtactactgcgccagaaacgtgttcgacggctactggctggtgtattggggccagggaacactggtcacagtgtccagcggcggaagcggaggagaagtgcagctgctggaatctggcggaggactggttcaacctggcggctctctgagactgtcttgtgccgccagcggcttcacctttagcacctacgccatgaactgggtccgacaggcccctggcaaaggccttgaatgggtgtcccggatcagaagcaagtacaacaactacgccacctactacgccgacagcgtgaagggcagattcaccatcagccgggacgacagcaagaacaccctgtacctgcagatgaacagcctgagagccgaggacaccgccgtgtactattgtgtgcggcacggcaacttcggcaacagctatgtgtcttggtttgcctactggggccagggcacactggtcacagttagctctgcttctggaggctccggagataagacccacacatgtcctccatgtcctgctccagaggctgctggtggcccttccgtgtttctgttccctccaaagcctaaggacaccctgatgatcagcaggacccctgaagtgacctgcgtggtggtggatgtgtctcacgaggacccagaagtgaagttcaattggtacgtggacggcgtggaagtgcacaacgccaagaccaagcctagagaggaacagtacaacagcacctacagagtggtgtccgtgctgaccgtgctgcaccaggattggctgaacggcaaagagtacaagtgcaaggtgtccaacaaggccctggccgctcctatcgagaaaaccatcagcaaggccaagggccagcctcgcgaacctcaagtctgtacactgcctcctagccgggacgagctgaccaagaatcaggtgtcactgagctgcgccgtgaagggcttttaccccagcgacattgccgtggaatgggagagcaatggccagccagagaacaactacaagacaacccctcctgtgctggacagcgacggctcatttttcctggtgtccaagctgacagtggacaagagcagatggcagcagggcaacgtgttcagctgcagcgtgatgcacgaggccctgcacaaccactacacccagaaaagcctgtctctgagccctggc

SEQ ID NO: 621 - protein, 724 aa, synthetic construct; identical to SEQ ID NO: 617
  REGION 1..724: note = _

SEQ ID NO: 622 - DNA, 2172 bp, synthetic construct; identical to SEQ ID NO: 618
  misc_feature 1..2172: note = _
  source 1..2172: mol_type = other DNA

SEQ ID NO: 623 - protein, 727 aa, synthetic construct
  REGION 1..727: note = _
DIVMTQTPLSLPVTPGEPASISCRSSKSLLHSNGITYLYWYLQKPGQSPQLLIYQMSNLVSGVPDRFSGSGSGTDFTLKISRVEAEDVGVYYCAQNLELPYTFGGGTKVEIKGGSGGQAVVTQEPSLTVSPGGTVTLTCGSSTGAVTTSNYANWVQEKPGQAFRGLIGGTNKRAPGTPARFSGSLLGGKAALTLSGAQPEDEAEYYCALWYSNLWVFGGGTKLTVLGSGGSAGSGSGGGGSASGSGEVQLLESGGGLVQPGGSLRLSCAASGFTFSTYAMNWVRQAPGKGLEWVSRIRSKYNNYATYYADSVKGRFTISRDDSKNTLYLQMNSLRAEDTAVYYCVRHGNFGNSYVSWFAYWGQGTLVTVSSGGSGGQVQLVQSGAEVKKPGSSVKVSCKASGYAFSYSWINWVRQAPGQGLEWMGRIFPGDGDTDYNGKFKGRVTITADKSTSTAYMELSSLRSEDTAVYYCARNVFDGYWLVYWGQGTLVTVSSASGGSGDKTHTCPPCPAPEAAGGPSVFLFPPKPKDTLMISRTPEVTCVVVDVSHEDPEVKFNWYVDGVEVHNAKTKPREEQYNSTYRVVSVLTVLHQDWLNGKEYKCKVSNKALAAPIEKTISKAKGQPREPQVCTLPPSRDELTKNQVSLSCAVKGFYPSDIAVEWESNGQPENNYKTTPPVLDSDGSFFLVSKLTVDKSRWQQGNVFSCSVMHEALHNHYTQKSLSLSPG

SEQ ID NO: 624 - DNA, 2181 bp, synthetic construct
  misc_feature 1..2181: note = _
  source 1..2181: mol_type = other DNA
gacatcgtgatgacccagacacctctgagcctgcctgtgacacctggcgaacctgccagcatcagctgcagaagcagcaagagcctgctgcacagcaacggcatcacctacctgtactggtatctgcagaaacccggccagtctcctcagctgctgatctaccagatgagcaacctggtgtccggcgtgcccgatagattttctggcagcggctctggcaccgacttcaccctgaagattagcagagtggaagccgaggacgtgggcgtgtactactgtgcccagaacctggaactgccctacacctttggcggaggcaccaaggtggaaatcaaaggcggatctggcggccaggccgtggttacacaagagccttctctgaccgtgtctcctggcggcacagtgacactgacatgtggcagttctacaggcgccgtgaccaccagcaattacgccaactgggtgcaagagaagccaggccaggccttcagaggactgatcggcggcacaaacaagagagcccctggaacaccagccagattcagcggatctctgctcggaggaaaggccgcactgacactgtctggtgcccagcctgaagatgaggccgagtactattgcgccctgtggtacagcaacctgtgggttttcggaggcggcaccaagctgacagtgcttggttctggcggcagcgccggaagtggtagtggtggcggaggatctgcttctggctctggagaagtgcagctgctggaatctggcggaggactggttcaacctggcggctctctgagactgtcttgtgccgccagcggcttcacctttagcacctacgccatgaactgggtccgacaggcccctggcaaaggccttgaatgggtgtcccggatcagaagcaagtacaacaactacgccacctactacgccgacagcgtgaagggcagattcaccatcagccgggacgacagcaagaacaccctgtacctgcagatgaacagcctgagagccgaggacaccgccgtgtactattgtgtgcggcacggcaacttcggcaacagctatgtgtcttggtttgcctactggggccagggcacactggtcacagttagctctggcggaagcggaggacaggttcagctggttcagtctggcgccgaagtgaagaaacctggcagcagcgtgaaggtgtcctgcaaggcctctggctacgccttcagctacagctggatcaactgggtccgacaggcccctggacaaggcttggaatggatgggcagaatcttccccggcgacggcgacaccgattacaacggcaagttcaagggcagagtgaccatcaccgccgacaagagcacaagcaccgcctacatggaactgagcagcctgagaagcgaggacaccgccgtgtactactgcgccagaaacgtgttcgacggctactggctggtgtattggggccagggaacactggtcacagtgtccagcgcttctggaggctccggagataagacccacacatgtcctccatgtcctgctccagaggctgctggtggcccttccgtgtttctgttccctccaaagcctaaggacaccctgatgatcagcaggacccctgaagtgacctgcgtggtggtggatgtgtctcacgaggacccagaagtgaagttcaattggtacgtggacggcgtggaagtgcacaacgccaagaccaagcctagagaggaacagtacaacagcacctacagagtggtgtccgtgctgaccgtgctgcaccaggattggctgaacggcaaagagtacaagtgcaaggtgtccaacaaggccctggccgctcctatcgagaaaaccatcagcaaggccaagggccagcctcgcgaacctcaagtctgtacactgcctcctagccgggacgagctgaccaagaatcaggtgtcactgagctgcgccgtgaagggcttttaccccagcgacattgccgtggaatgggagagcaatggccagccagagaacaactacaagacaacccctcctgtgctggacagcgacggctcatttttcctggtgtccaagctgacagtggacaagagcagatggcagcagggcaacgtgttcagctgcagcgtgatgcacgaggccctgcacaaccactacacccagaaaagcctgtctctgagccctggc

SEQ ID NO: 625 - protein, 722 aa, synthetic construct
  REGION 1..722: note = _
DIVMTQTPLSLPVTPGEPASISCRSSKSLLHSNGITYLYWYLQKPGQSPQLLIYQMSNLVSGVPDRFSGSGSGTDFTLKISRVEAEDVGVYYCAQNLELPYTFGGGTKVEIKGGSGGSYVLTQPPSVSVAPGQTARITCGGNNIGSKSVHWYQQPPGQAPVVVVYDDSDRPSGIPERFSGSNSGNTATLTISRVEAGDEAVYYCQVWDSSSDHVVFGGGTKLTVLGSGGSAGSGSGGGGSASGSGQLQLQESGPGLVKPSETLSLTCTVSGGSISSGSYFWGWIRQPPGKGLEWIGSIYYSGITYYNPSLKSRVTISVDTSKNQFSLKLSSVTAADTAVYYCARHDGAVAGLFDYWGQGTLVTVSSGGSGGQVQLVQSGAEVKKPGSSVKVSCKASGYAFSYSWINWVRQAPGQGLEWMGRIFPGDGDTDYNGKFKGRVTITADKSTSTAYMELSSLRSEDTAVYYCARNVFDGYWLVYWGQGTLVTVSSASGGSGDKTHTCPPCPAPEAAGGPSVFLFPPKPKDTLMISRTPEVTCVVVDVSHEDPEVKFNWYVDGVEVHNAKTKPREEQYNSTYRVVSVLTVLHQDWLNGKEYKCKVSNKALAAPIEKTISKAKGQPREPQVYTLPPCRDELTKNQVSLWCLVKGFYPSDIAVEWESNGQPENNYKTTPPVLDSDGSFFLYSKLTVDKSRWQQGNVFSCSVMHEALHNHYTQKSLSLSPG

SEQ ID NO: 626 - DNA, 2166 bp, synthetic construct
  misc_feature 1..2166: note = _
  source 1..2166: mol_type = other DNA
gacatcgtgatgacccagacacctctgagcctgcctgtgacacctggcgaacctgccagcatcagctgcagaagcagcaagagcctgctgcacagcaacggcatcacctacctgtactggtatctgcagaaacccggccagtctcctcagctgctgatctaccagatgagcaacctggtgtccggcgtgcccgatagattttctggcagcggctctggcaccgacttcaccctgaagattagcagagtggaagccgaggacgtgggcgtgtactactgtgcccagaacctggaactgccctacacctttggcggaggcaccaaggtggaaatcaagggcggatctggcggcagctacgtgctgacacaacctccatctgtgtctgtggcccctggccagacagccagaattacatgcggcggcaacaacatcggcagcaagtccgtgcattggtatcagcagcctccaggacaggctcctgtggtggtggtgtacgacgacagcgatagacctagcggcatccccgagagattcagcggcagcaatagcggcaataccgccacactgaccatcagcagagttgaggctggcgacgaggccgtgtactattgccaagtgtgggacagcagcagcgatcacgtggtgtttggcggcggaacaaagctgacagtgctcggttctggcggcagcgccggaagtggtagtggtggcggaggatctgcttctggctctggacagctccagctgcaagagtctggccctggactggtcaagcctagcgagacactgagcctgacatgtaccgtgtctggcggcagcatctccagcggctcctatttctggggctggatcagacaacctcctggcaaaggcctggaatggatcggctccatctactacagcggaatcacctactacaaccccagcctgaagtccagagtgaccatctccgtggacaccagcaagaaccagttctccctgaagctgagcagcgtgacagccgccgataccgccgtctattactgcgccagacatgatggcgctgtggccggcctgtttgattattggggacagggcaccctggtcaccgttagcagcggcggaagcggaggacaggttcagctggttcagtctggcgccgaagtgaagaaacctggcagcagcgtgaaggtgtcctgcaaggcctctggctacgccttcagctacagctggatcaactgggtccgacaggcccctggacaaggcttggaatggatgggcagaatcttccccggcgacggcgacaccgattacaacggcaagttcaagggcagagtgaccatcaccgccgacaagagcacaagcaccgcctacatggaactgagcagcctgagaagcgaggacaccgccgtgtactactgcgccagaaacgtgttcgacggctactggctggtgtattggggccagggaacactggtcacagtgtccagcgcttctggaggctccggagataagacccacacatgtcctccatgtcctgctccagaagctgctggcggcccttctgtgttcctgtttcctccaaagcctaaggacaccctgatgatcagcagaacccctgaagtgacctgcgtggtggtggatgtgtctcacgaggaccccgaagtgaagttcaattggtacgtggacggcgtggaagtgcacaacgccaagaccaagcctagagaggaacagtacaacagcacctacagagtggtgtccgtgctgaccgtgctgcaccaggattggctgaacggcaaagagtacaagtgcaaggtgtccaacaaggccctggccgctcctatcgagaaaaccatcagcaaggccaagggccagcctagggaaccccaggtttacacccttcctccatgccgggatgagctgaccaagaaccaggtgtccctgtggtgtctcgtgaagggcttctaccccagcgacattgccgtggaatgggagagcaatggccagcctgagaacaactacaagacaacccctcctgtgctggacagcgacggctcattcttcctgtacagcaagctgacagtcgacaagtccagatggcagcagggcaacgtgttcagttgcagcgtgatgcacgaggccctgcacaaccactacacccagaagtccctgagcctgtctcctgga

SEQ ID NO: 627 - protein, 723 aa, synthetic construct
  REGION 1..723: note = _
QAVVTQEPSLTVSPGGTVTLTCGSSTGAVTTSNYANWVQEKPGQAFRGLIGGTNKRAPGTPARFSGSLLGGKAALTLSGAQPEDEAEYYCALWYSNLWVFGGGTKLTVLGGSGGDIQMTQSPSSLSASVGDRVTITCHASQNIYVWLNWYQQKPGKAPKLLIYKASNLHTGVPSRFSGSGSGTDFTLTISSLQPEDFATYYCQQGQTYPYTFGGGTKVEIKGSGGSAGSGSGGGGSASGSGQVQLVQSGAEVKKPGASVKVSCKASGYTFTSYYIHWVRQAPGQGLEWIGSIYPGNVNTNYNEKFKDRATLTVDTSISTAYMELSRLRSDDTAVYFCTRSHYGLDWNFDVWGQGTTVTVSSGGSGGEVQLLESGGGLVQPGGSLRLSCAASGFTFSTYAMNWVRQAPGKGLEWVSRIRSKYNNYATYYADSVKGRFTISRDDSKNTLYLQMNSLRAEDTAVYYCVRHGNFGNSYVSWFAYWGQGTLVTVSSASGGSGDKTHTCPPCPAPEAAGGPSVFLFPPKPKDTLMISRTPEVTCVVVDVSHEDPEVKFNWYVDGVEVHNAKTKPREEQYNSTYRVVSVLTVLHQDWLNGKEYKCKVSNKALAAPIEKTISKAKGQPREPQVCTLPPSRDELTKNQVSLSCAVKGFYPSDIAVEWESNGQPENNYKTTPPVLDSDGSFFLVSKLTVDKSRWQQGNVFSCSVMHEALHNHYTQKSLSLSPG

SEQ ID NO: 628 - DNA, 2169 bp, synthetic construct
  misc_feature 1..2169: note = _
  source 1..2169: mol_type = other DNA
caggccgtggttacacaagagccttctctgaccgtgtctcctggcggcacagtgacactgacatgtggcagttctacaggcgccgtgaccaccagcaattacgccaactgggtgcaagagaagccaggccaggccttcagaggactgatcggcggcacaaacaagagagcccctggaacaccagccagattcagcggatctctgctcggaggaaaggccgcactgacactgtctggtgcccagcctgaagatgaggccgagtactattgcgccctgtggtacagcaacctgtgggttttcggaggcggcaccaagctgacagtgcttggcggatctggcggcgacatccagatgacacagagccctagcagcctgtctgccagcgtgggagacagagtgaccatcacatgtcacgccagccagaacatctacgtgtggctgaactggtatcagcagaagcccggcaaggcccctaagctgctgatctacaaggccagcaatctgcacaccggcgtgcccagcagattttctggctctggcagcggcaccgacttcaccctgaccatatctagcctgcagcctgaggacttcgccacctactattgtcagcagggccagacatacccctacacctttggcggcggaacaaaggtggaaatcaagggttctggcggcagcgccggaagtggtagtggtggcggaggatctgcttctggctctggacaggttcagctggttcagtctggcgccgaagtgaagaaacctggcgcctctgtgaaggtgtcctgcaaggccagcggctacacctttaccagctactacatccactgggtccgacaggcccctggacaaggactggaatggatcggcagcatctaccccggcaacgtgaacaccaactacaacgagaagttcaaggaccgggccacactgaccgtggacacctctatcagcaccgcctacatggaactgagccggctgagatccgatgataccgccgtgtacttctgcaccagaagccactacggcctggactggaacttcgatgtgtggggccagggcaccaccgtgacagtttcttctggcggaagcggaggagaagtgcagctgctggaatctggcggaggactggttcaacctggcggctctctgagactgtcttgtgccgccagcggcttcacctttagcacctacgccatgaactgggtccgacaggcccctggcaaaggccttgaatgggtgtcccggatcagaagcaagtacaacaactacgccacctactacgccgacagcgtgaagggcagattcaccatcagccgggacgacagcaagaacaccctgtacctgcagatgaacagcctgagagccgaggacaccgccgtgtactattgtgtgcggcacggcaacttcggcaacagctatgtgtcttggtttgcctactggggccagggcacactggtcacagttagctctgcttctggaggctccggagataagacccacacatgtcctccatgtcctgctccagaggctgctggtggcccttccgtgtttctgttccctccaaagcctaaggacaccctgatgatcagcaggacccctgaagtgacctgcgtggtggtggatgtgtctcacgaggacccagaagtgaagttcaattggtacgtggacggcgtggaagtgcacaacgccaagaccaagcctagagaggaacagtacaacagcacctacagagtggtgtccgtgctgaccgtgctgcaccaggattggctgaacggcaaagagtacaagtgcaaggtgtccaacaaggccctggccgctcctatcgagaaaaccatcagcaaggccaagggccagcctcgcgaacctcaagtctgtacactgcctcctagccgggacgagctgaccaagaatcaggtgtcactgagctgcgccgtgaagggcttttaccccagcgacattgccgtggaatgggagagcaatggccagccagagaacaactacaagacaacccctcctgtgctggacagcgacggctcatttttcctggtgtccaagctgacagtggacaagagcagatggcagcagggcaacgtgttcagctgcagcgtgatgcacgaggccctgcacaaccactacacccagaaaagcctgtctctgagccctggc

SEQ ID NO: 629 - protein, 722 aa, synthetic construct; identical to SEQ ID NO: 625
  REGION 1..722: note = _

SEQ ID NO: 630 - DNA, 2166 bp, synthetic construct; identical to SEQ ID NO: 626
  misc_feature 1..2166: note = _
  source 1..2166: mol_type = other DNA

SEQ ID NO: 631 - protein, 723 aa, synthetic construct
  REGION 1..723: note = _
DIQMTQSPSSLSASVGDRVTITCHASQNIYVWLNWYQQKPGKAPKLLIYKASNLHTGVPSRFSGSGSGTDFTLTISSLQPEDFATYYCQQGQTYPYTFGGGTKVEIKGGSGGQAVVTQEPSLTVSPGGTVTLTCGSSTGAVTTSNYANWVQEKPGQAFRGLIGGTNKRAPGTPARFSGSLLGGKAALTLSGAQPEDEAEYYCALWYSNLWVFGGGTKLTVLGSGGSAGSGSGGGGSASGSGEVQLLESGGGLVQPGGSLRLSCAASGFTFSTYAMNWVRQAPGKGLEWVSRIRSKYNNYATYYADSVKGRFTISRDDSKNTLYLQMNSLRAEDTAVYYCVRHGNFGNSYVSWFAYWGQGTLVTVSSGGSGGQVQLVQSGAEVKKPGASVKVSCKASGYTFTSYYIHWVRQAPGQGLEWIGSIYPGNVNTNYNEKFKDRATLTVDTSISTAYMELSRLRSDDTAVYFCTRSHYGLDWNFDVWGQGTTVTVSSASGGSGDKTHTCPPCPAPEAAGGPSVFLFPPKPKDTLMISRTPEVTCVVVDVSHEDPEVKFNWYVDGVEVHNAKTKPREEQYNSTYRVVSVLTVLHQDWLNGKEYKCKVSNKALAAPIEKTISKAKGQPREPQVCTLPPSRDELTKNQVSLSCAVKGFYPSDIAVEWESNGQPENNYKTTPPVLDSDGSFFLVSKLTVDKSRWQQGNVFSCSVMHEALHNHYTQKSLSLSPG

SEQ ID NO: 632 - DNA, 2169 bp, synthetic construct
  misc_feature 1..2169: note = _
  source 1..2169: mol_type = other DNA
gacatccagatgacacagagccctagcagcctgtctgccagcgtgggagacagagtgaccatcacatgtcacgccagccagaacatctacgtgtggctgaactggtatcagcagaagcccggcaaggcccctaagctgctgatctacaaggccagcaatctgcacaccggcgtgcccagcagattttctggctctggcagcggcaccgacttcaccctgaccatatctagcctgcagcctgaggacttcgccacctactattgtcagcagggccagacatacccctacacctttggcggcggaacaaaggtggaaatcaagggcggatctggcggccaggccgtggttacacaagagccttctctgaccgtgtctcctggcggcacagtgacactgacatgtggcagttctacaggcgccgtgaccaccagcaattacgccaactgggtgcaagagaagccaggccaggccttcagaggactgatcggcggcacaaacaagagagcccctggaacaccagccagattcagcggatctctgctcggaggaaaggccgcactgacactgtctggtgcccagcctgaagatgaggccgagtactattgcgccctgtggtacagcaacctgtgggttttcggaggcggcaccaagctgacagtgcttggttctggcggcagcgccggaagtggtagtggtggcggaggatctgcttctggctctggagaagtgcagctgctggaatctggcggaggactggttcaacctggcggctctctgagactgtcttgtgccgccagcggcttcacctttagcacctacgccatgaactgggtccgacaggcccctggcaaaggccttgaatgggtgtcccggatcagaagcaagtacaacaactacgccacctactacgccgacagcgtgaagggcagattcaccatcagccgggacgacagcaagaacaccctgtacctgcagatgaacagcctgagagccgaggacaccgccgtgtactattgtgtgcggcacggcaacttcggcaacagctatgtgtcttggtttgcctactggggccagggcacactggtcacagttagctctggcggaagcggaggacaggttcagctggttcagtctggcgccgaagtgaagaaacctggcgcctctgtgaaggtgtcctgcaaggccagcggctacacctttaccagctactacatccactgggtccgacaggcccctggacaaggactggaatggatcggcagcatctaccccggcaacgtgaacaccaactacaacgagaagttcaaggaccgggccacactgaccgtggacacctctatcagcaccgcctacatggaactgagccggctgagatccgatgataccgccgtgtacttctgcaccagaagccactacggcctggactggaacttcgatgtgtggggccagggcaccaccgtgacagtttcttctgcttctggaggctccggagataagacccacacatgtcctccatgtcctgctccagaggctgctggtggcccttccgtgtttctgttccctccaaagcctaaggacaccctgatgatcagcaggacccctgaagtgacctgcgtggtggtggatgtgtctcacgaggacccagaagtgaagttcaattggtacgtggacggcgtggaagtgcacaacgccaagaccaagcctagagaggaacagtacaacagcacctacagagtggtgtccgtgctgaccgtgctgcaccaggattggctgaacggcaaagagtacaagtgcaaggtgtccaacaaggccctggccgctcctatcgagaaaaccatcagcaaggccaagggccagcctcgcgaacctcaagtctgtacactgcctcctagccgggacgagctgaccaagaatcaggtgtcactgagctgcgccgtgaagggcttttaccccagcgacattgccgtggaatgggagagcaatggccagccagagaacaactacaagacaacccctcctgtgctggacagcgacggctcatttttcctggtgtccaagctgacagtggacaagagcagatggcagcagggcaacgtgttcagctgcagcgtgatgcacgaggccctgcacaaccactacacccagaaaagcctgtctctgagccctggc

SEQ ID NO: 633 - protein, 722 aa, synthetic construct
  REGION 1..722: note = _
SYVLTQPPSVSVAPGQTARITCGGNNIGSKSVHWYQQPPGQAPVVVVYDDSDRPSGIPERFSGSNSGNTATLTISRVEAGDEAVYYCQVWDSSSDHVVFGGGTKLTVLGGSGGDIVMTQTPLSLPVTPGEPASISCRSSKSLLHSNGITYLYWYLQKPGQSPQLLIYQMSNLVSGVPDRFSGSGSGTDFTLKISRVEAEDVGVYYCAQNLELPYTFGGGTKVEIKGSGGSAGSGSGGGGSASGSGQVQLVQSGAEVKKPGSSVKVSCKASGYAFSYSWINWVRQAPGQGLEWMGRIFPGDGDTDYNGKFKGRVTITADKSTSTAYMELSSLRSEDTAVYYCARNVFDGYWLVYWGQGTLVTVSSGGSGGQLQLQESGPGLVKPSETLSLTCTVSGGSISSGSYFWGWIRQPPGKGLEWIGSIYYSGITYYNPSLKSRVTISVDTSKNQFSLKLSSVTAADTAVYYCARHDGAVAGLFDYWGQGTLVTVSSASGGSGDKTHTCPPCPAPEAAGGPSVFLFPPKPKDTLMISRTPEVTCVVVDVSHEDPEVKFNWYVDGVEVHNAKTKPREEQYNSTYRVVSVLTVLHQDWLNGKEYKCKVSNKALAAPIEKTISKAKGQPREPQVYTLPPCRDELTKNQVSLWCLVKGFYPSDIAVEWESNGQPENNYKTTPPVLDSDGSFFLYSKLTVDKSRWQQGNVFSCSVMHEALHNHYTQKSLSLSPG

SEQ ID NO: 634 - DNA, 2166 bp, synthetic construct
  misc_feature 1..2166: note = _
  source 1..2166: mol_type = other DNA
agctacgtgctgacacaacctccatctgtgtctgtggcccctggccagacagccagaattacatgcggcggcaacaacatcggcagcaagtccgtgcattggtatcagcagcctccaggacaggctcctgtggtggtggtgtacgacgacagcgatagacctagcggcatccccgagagattcagcggcagcaatagcggcaataccgccacactgaccatcagcagagttgaggctggcgacgaggccgtgtactattgccaagtgtgggacagcagcagcgatcacgtggtgtttggcggcggaacaaagctgacagtgctcggcggatctggcggcgacatcgtgatgacccagacacctctgagcctgcctgtgacacctggcgaacctgccagcatcagctgcagaagcagcaagagcctgctgcacagcaacggcatcacctacctgtactggtatctgcagaaacccggccagtctcctcagctgctgatctaccagatgagcaacctggtgtccggcgtgcccgatagattttctggcagcggctctggcaccgacttcaccctgaagattagcagagtggaagccgaggacgtgggcgtgtactactgtgcccagaacctggaactgccctacacctttggcggaggcaccaaggtggaaatcaagggttctggcggcagcgccggaagtggtagtggtggcggaggatctgcttctggctctggacaggttcagctggttcagtctggcgccgaagtgaagaaacctggcagcagcgtgaaggtgtcctgcaaggcctctggctacgccttcagctacagctggatcaactgggtccgacaggcccctggacaaggcttggaatggatgggcagaatcttccccggcgacggcgacaccgattacaacggcaagttcaagggcagagtgaccatcaccgccgacaagagcacaagcaccgcctacatggaactgagcagcctgagaagcgaggacaccgccgtgtactactgcgccagaaacgtgttcgacggctactggctggtgtattggggccagggaacactggtcacagtgtccagcggcggaagcggaggacagctccagctgcaagagtctggccctggactggtcaagcctagcgagacactgagcctgacatgtaccgtgtctggcggcagcatctccagcggctcctatttctggggctggatcagacaacctcctggcaaaggcctggaatggatcggctccatctactacagcggaatcacctactacaaccccagcctgaagtccagagtgaccatctccgtggacaccagcaagaaccagttctccctgaagctgagcagcgtgacagccgccgataccgccgtctattactgcgccagacatgatggcgctgtggccggcctgtttgattattggggacagggcaccctggtcaccgttagcagcgcttctggaggctccggagataagacccacacatgtcctccatgtcctgctccagaagctgctggcggcccttctgtgttcctgtttcctccaaagcctaaggacaccctgatgatcagcagaacccctgaagtgacctgcgtggtggtggatgtgtctcacgaggaccccgaagtgaagttcaattggtacgtggacggcgtggaagtgcacaacgccaagaccaagcctagagaggaacagtacaacagcacctacagagtggtgtccgtgctgaccgtgctgcaccaggattggctgaacggcaaagagtacaagtgcaaggtgtccaacaaggccctggccgctcctatcgagaaaaccatcagcaaggccaagggccagcctagggaaccccaggtttacacccttcctccatgccgggatgagctgaccaagaaccaggtgtccctgtggtgtctcgtgaagggcttctaccccagcgacattgccgtggaatgggagagcaatggccagcctgagaacaactacaagacaacccctcctgtgctggacagcgacggctcattcttcctgtacagcaagctgacagtcgacaagtccagatggcagcagggcaacgtgttcagttgcagcgtgatgcacgaggccctgcacaaccactacacccagaagtccctgagcctgtctcctgga

SEQ ID NO: 635 - protein, 723 aa, synthetic construct; identical to SEQ ID NO: 627
  REGION 1..723: note = _

SEQ ID NO: 636 - DNA, 2169 bp, synthetic construct; identical to SEQ ID NO: 628
  misc_feature 1..2169: note = _
  source 1..2169: mol_type = other DNA

SEQ ID NO: 637 - protein, 722 aa, synthetic construct; identical to SEQ ID NO: 633
  REGION 1..722: note = _

SEQ ID NO: 638 - DNA, 2166 bp, synthetic construct; identical to SEQ ID NO: 634
  misc_feature 1..2166: note = _
  source 1..2166: mol_type = other DNA

SEQ ID NO: 639 - protein, 723 aa, synthetic construct; identical to SEQ ID NO: 631
  REGION 1..723: note = _

SEQ ID NO: 640 - DNA, 2169 bp, synthetic construct; identical to SEQ ID NO: 632
  misc_feature 1..2169: note = _
  source 1..2169: mol_type = other DNA

SEQ ID NO: 641 - protein, 724 aa, synthetic construct; identical to SEQ ID NO: 617
  REGION 1..724: note = _

SEQ ID NO: 642 - DNA, 2172 bp, synthetic construct; identical to SEQ ID NO: 618
  misc_feature 1..2172: note = _
  source 1..2172: mol_type = other DNA

SEQ ID NO: 643 - protein, 723 aa, synthetic construct; identical to SEQ ID NO: 627
  REGION 1..723: note = _

SEQ ID NO: 644 - DNA, 2169 bp, synthetic construct; identical to SEQ ID NO: 628
  misc_feature 1..2169: note = _
  source 1..2169: mol_type = other DNA

SEQ ID NO: 645 - protein, 724 aa, synthetic construct; identical to SEQ ID NO: 617
  REGION 1..724: note = _

SEQ ID NO: 646 - DNA, 2172 bp, synthetic construct; identical to SEQ ID NO: 618
  misc_feature 1..2172: note = _
  source 1..2172: mol_type = other DNA

SEQ ID NO: 647 - protein, 723 aa, synthetic construct; identical to SEQ ID NO: 631
  REGION 1..723: note = _

SEQ ID NO: 648 - DNA, 2169 bp, synthetic construct; identical to SEQ ID NO: 632
  misc_feature 1..2169: note = _
  source 1..2169: mol_type = other DNA

SEQ ID NO: 649 - protein, 476 aa, synthetic construct
  REGION 1..476: note = _
EIVLTQSPGTLSLSPGETAIISCRTSQYGSLAWYQQRPGQAPRLVIYSGSTRAAGIPDRFSGSRWGPDYNLTISNLESGDFGVYYCQQYEFFGQGTKVQVDIKGGGGSGGSGSGGGGSASGSGQVQLVQSGGQMKKPGESMRISCRASGYEFIDCTLNWIRLAPGKRPEWMGWLKPRGGAVNYARPLQGRVTMTRDVYSDTAFLELRSLTVDDTAVYFCTRGKNCDYNWDFEHWGRGTPVIVSSASGGSGDKTHTCPPCPAPELLGGPSVFLFPPKPKDTLMISRTPEVTCVVVDVSHEDPEVKFNWYVDGVEVHNAKTKPREEQYNSTYRVVSVLTVLHQDWLNGKEYKCKVSNKALPAPIEKTISKAKGQPREPQVYTLPPCRDELTKNQVSLWCLVKGFYPSDIAVEWESNGQPENNYKTTPPVLDSDGSFFLYSKLTVDKSRWQQGNVFSCSVMHEALHNHYTQKSLSLSPG

SEQ ID NO: 650 - DNA, 1428 bp, synthetic construct; identical to SEQ ID NO: 360
  misc_feature 1..1428: note = _
  source 1..1428: mol_type = other DNA

SEQ ID NO: 651 - protein, 738 aa, synthetic construct; identical to SEQ ID NO: 192
  REGION 1..738: note = _

SEQ ID NO: 652 - DNA, 2214 bp, synthetic construct; identical to SEQ ID NO: 367
  misc_feature 1..2214: note = _
  source 1..2214: mol_type = other DNA

SEQ ID NO: 653 - protein, 758 aa, synthetic construct
  REGION 1..758: note = _
QSVLTQPPSVSAAPGQKVTISCSGNTSNIGNNFVSWYQQRPGRAPQLLIYETDKRPSGIPDRFSASKSGTSGTLAITGLQTGDEADYYCATWAASLSSARVFGTGTKVIVLGGGGSSYVRPLSVALGETARISCGRQALGSRAVQWYQHRPGQAPILLIYNNQDRPSGIPERFSGTPDINFGTRATLTISGVEAGDEADYYCHMWDSRSGFSWSFGGATRLTVLGSGGSGGSGSGGGGSASGSGQVQLQESGPGLVKPSETLSVTCSVSGDSMNNYYWTWIRQSPGKGLEWIGYISDRESATYNPSLNSRVVISRDTSKNQLSLKLNSVTPADTAVYYCATARRGQRIYGVVSFGEFFYYYSMDVWGKGTTVTVSSGGGGSQVQLVESGGGVVQPGTSLRLSCAASQFRFDGYGMHWVRQAPGKGLEWVASISHDGIKKYHAEKVWGRFTISRDNSKNTLYLQMNSLRPEDTALYYCAKDLREDECEEWWSDYYDFGKQLPCAKSRGGLVGIADNWGQGTMVTVSSASGGSGDKTHTCPPCPAPELLGGPSVFLFPPKPKDTLMISRTPEVTCVVVDVSHEDPEVKFNWYVDGVEVHNAKTKPREEQYNSTYRVVSVLTVLHQDWLNGKEYKCKVSNKALPAPIEKTISKAKGQPREPQVYTLPPCRDELTKNQVSLWCLVKGFYPSDIAVEWESNGQPENNYKTTPPVLDSDGSFFLYSKLTVDKSRWQQGNVFSCSVLHEALHSHYTQKSLSLSPG

SEQ ID NO: 654 - DNA, 2274 bp, synthetic construct
  misc_feature 1..2274: note = _
  source 1..2274: mol_type = other DNA
cagtctgtgctgacacagcctccatccgtgtctgctgcccctggccagaaagtgaccatcagctgtagcggcaacaccagcaacatcggcaacaacttcgtgtcctggtatcagcagaggcccggcagagcacctcagctgctgatctacgagacagacaagaggcccagcggcatccccgatagattttccgccagcaagagcggcacctctggcacactggctatcacaggactgcagacaggcgacgaggccgattactactgtgctacatgggccgccagcctgtctagcgccagagtttttggcaccggcaccaaagtgatcgtgctgggcggaggcggttctagctacgtcagacctctgtctgtggccctgggagagacagccagaatcagctgtggcagacaggctctgggaagcagagccgtgcagtggtatcagcacagacctggacaggcccctatcctgctgatctacaacaaccaggacagacccagcggcatccccgagagattttctggcacccctgacatcaacttcggcaccagagccacactgaccatctctggcgttgaagccggcgacgaggccgattactactgtcacatgtgggacagcagaagcggcttcagctggtcttttggcggagccaccagactgacagtgctgggttctggcggaagcggaggatctggatctggtggtggtggatctgcttctggcagtggacaggttcagctgcaagagtctggccctggcctggtcaagcctagcgaaacactgagcgtgacctgtagcgtgtccggcgacagcatgaacaactactactggacctggatcagacagagccccggcaaaggcctggaatggatcggctacatcagcgacagagagagcgccacctacaatcccagcctgaacagcagagtggtcatcagccgggacaccagcaagaaccagctgagcctgaagctgaacagcgtgacccctgccgataccgccgtgtactattgtgccaccgccagaagaggccagcggatctatggcgtggtgtccttcggcgagttcttctactactacagcatggacgtgtggggcaagggcaccaccgtgacagtgtctagcggaggcggaggtagtcaggttcagctggtggaatctggtggcggagtggtgcagcctggcacatctctgagactgtcttgtgccgcctctcagttcagattcgacggctacggaatgcactgggtccgacaggcacctggcaaaggccttgaatgggtcgccagcatcagccacgacggcatcaagaagtaccacgccgagaaagtgtggggcagattcaccatcagccgggacaacagcaagaacaccctgtacctgcagatgaacagcctgcggcctgaggacacagccctgtactattgcgccaaggacctgcgcgaggacgagtgtgaagaatggtggagcgactactacgacttcggcaagcagctgccctgcgccaaaagtagaggtggccttgtgggaatcgccgacaactggggacagggcacaatggtcacagtgtcctctgcttctggcggctccggagataagacccacacatgtcctccatgtcctgctccagaactgctcggcggcccttctgtgttcctgtttcctccaaagcctaaggacaccctgatgatcagcagaacccctgaagtgacctgcgtggtggtggatgtgtctcacgaggaccccgaagtgaagttcaattggtacgtggacggcgtggaagtgcacaacgccaagaccaagcctagagaggaacagtacaacagcacctacagagtggtgtccgtgctgaccgtgctgcaccaggattggctgaacggcaaagagtacaagtgcaaggtgtccaacaaggccctgcctgctcctatcgagaaaaccatcagcaaggccaagggccagcctagggaaccccaggtttacacccttcctccatgccgggatgagctgaccaagaaccaggtgtccctgtggtgtctcgtgaagggcttctaccccagcgacattgccgtggaatgggagagcaatggccagcctgagaacaactacaagacaacccctcctgtgctggacagcgacggctcattcttcctgtacagcaagctgacagtcgacaagtccagatggcagcagggcaacgtgttcagttgcagcgtgctgcacgaggccctgcacagtcactacacccagaagtccctgagcctgtctcctgga

SEQ ID NO: 655 - protein, 723 aa, synthetic construct
  REGION 1..723: note = _
EIVLTQSPGTLSLSPGETAIISCRTSQYGSLAWYQQRPGQAPRLVIYSGSTRAAGIPDRFSGSRWGPDYNLTISNLESGDFGVYYCQQYEFFGQGTKVQVDIKGGSSGSDISVAPGETARISCGEKSLGSRAVQWYQHRAGQAPSLIIYNNQDRPSGIPERFSGSPDSPFGTTATLTITSVEAGDEADYYCHIWDSRVPTKWVFGGGTTLTVLGGGGSGGSGSGGGGSASGSGQMQLQESGPGLVKPSETLSLTCSVSGASISDSYWSWIRRSPGKGLEWIGYVHKSGDTNYSPSLKSRVNLSLDTSKNQVSLSLVAATAADSGKYYCARTLHGRRIYGIVAFNEWFTYFYMDVWGNGTQVTVSSGGSSGQVQLVQSGGQMKKPGESMRISCRASGYEFIDCTLNWIRLAPGKRPEWMGWLKPRGGAVNYARPLQGRVTMTRDVYSDTAFLELRSLTVDDTAVYFCTRGKNCDYNWDFEHWGRGTPVIVSSASGGSGDKTHTCPPCPAPELLGGPSVFLFPPKPKDTLMISRTPEVTCVVVDVSHEDPEVKFNWYVDGVEVHNAKTKPREEQYNSTYRVVSVLTVLHQDWLNGKEYKCKVSNKALPAPIEKTISKAKGQPREPQVCTLPPSRDELTKNQVSLSCAVKGFYPSDIAVEWESNGQPENNYKTTPPVLDSDGSFFLVSKLTVDKSRWQQGNVFSCSVMHEALHNHYTQKSLSLSPG

SEQ ID NO: 656 - DNA, 2169 bp, synthetic construct; identical to SEQ ID NO: 364
  misc_feature 1..2169: note = _
  source 1..2169: mol_type = other DNA

SEQ ID NO: 657 - protein, 758 aa, synthetic construct
  REGION 1..758: note = _
SYVRPLSVALGETARISCGRQALGSRAVQWYQHRPGQAPILLIYNNQDRPSGIPERFSGTPDINFGTRATLTISGVEAGDEADYYCHMWDSRSGFSWSFGGATRLTVLGGGGSQSVLTQPPSVSAAPGQKVTISCSGNTSNIGNNFVSWYQQRPGRAPQLLIYETDKRPSGIPDRFSASKSGTSGTLAITGLQTGDEADYYCATWAASLSSARVFGTGTKVIVLGSGGSGGSGSGGGGSASGSGQVQLVESGGGVVQPGTSLRLSCAASQFRFDGYGMHWVRQAPGKGLEWVASISHDGIKKYHAEKVWGRFTISRDNSKNTLYLQMNSLRPEDTALYYCAKDLREDECEEWWSDYYDFGKQLPCAKSRGGLVGIADNWGQGTMVTVSSGGGGSQVQLQESGPGLVKPSETLSVTCSVSGDSMNNYYWTWIRQSPGKGLEWIGYISDRESATYNPSLNSRVVISRDTSKNQLSLKLNSVTPADTAVYYCATARRGQRIYGVVSFGEFFYYYSMDVWGKGTTVTVSSASGGSGDKTHTCPPCPAPELLGGPSVFLFPPKPKDTLMISRTPEVTCVVVDVSHEDPEVKFNWYVDGVEVHNAKTKPREEQYNSTYRVVSVLTVLHQDWLNGKEYKCKVSNKALPAPIEKTISKAKGQPREPQVYTLPPCRDELTKNQVSLWCLVKGFYPSDIAVEWESNGQPENNYKTTPPVLDSDGSFFLYSKLTVDKSRWQQGNVFSCSVLHEALHSHYTQKSLSLSPG

SEQ ID NO: 658 - DNA, 2274 bp, synthetic construct
  misc_feature 1..2274: note = _
  source 1..2274: mol_type = other DNA
agctacgtcagacctctgtctgtggccctgggagagacagccagaatcagctgtggcagacaggctctgggaagcagagccgtgcagtggtatcagcacagacctggacaggcccctatcctgctgatctacaacaaccaggacagacccagcggcatccccgagagattttctggcacccctgacatcaacttcggcaccagagccacactgaccatctctggcgttgaagccggcgacgaggccgattactactgtcacatgtgggacagcagaagcggcttcagctggtcttttggcggagccaccagactgacagtgctgggcggaggcggttctcagtctgtgctgacacagcctccatccgtgtctgctgcccctggccagaaagtgaccatcagctgtagcggcaacaccagcaacatcggcaacaacttcgtgtcctggtatcagcagaggcccggcagagcacctcagctgctgatctacgagacagacaagaggcccagcggcatccccgatagattttccgccagcaagagcggcacctctggcacactggctatcacaggactgcagacaggcgacgaggccgattactactgtgctacatgggccgccagcctgtctagcgccagagtttttggcaccggcaccaaagtgatcgtgctgggttctggcggaagcggaggatctggatctggtggtggtggatctgcttctggcagtggacaggttcagctggtggaatctggtggcggagtggtgcagcctggcacatctctgagactgtcttgtgccgcctctcagttcagattcgacggctacggaatgcactgggtccgacaggcacctggcaaaggccttgaatgggtcgccagcatcagccacgacggcatcaagaagtaccacgccgagaaagtgtggggcagattcaccatcagccgggacaacagcaagaacaccctgtacctgcagatgaacagcctgcggcctgaggacacagccctgtactattgcgccaaggacctgcgcgaggacgagtgtgaagaatggtggagcgactactacgacttcggcaagcagctgccctgcgccaaaagtagaggtggccttgtgggaatcgccgacaactggggacagggcacaatggtcacagtgtcctctggaggcggaggtagtcaggttcagctgcaagagtctggccctggcctggtcaagcctagcgaaacactgagcgtgacctgtagcgtgtccggcgacagcatgaacaactactactggacctggatcagacagagccccggcaaaggcctggaatggatcggctacatcagcgacagagagagcgccacctacaatcccagcctgaacagcagagtggtcatcagccgggacaccagcaagaaccagctgagcctgaagctgaacagcgtgacccctgccgataccgccgtgtactattgtgccaccgccagaagaggccagcggatctatggcgtggtgtccttcggcgagttcttctactactacagcatggacgtgtggggcaagggcaccaccgtgacagtgtctagcgcttctggcggctccggagataagacccacacatgtcctccatgtcctgctccagaactgctcggcggcccttctgtgttcctgtttcctccaaagcctaaggacaccctgatgatcagcagaacccctgaagtgacctgcgtggtggtggatgtgtctcacgaggaccccgaagtgaagttcaattggtacgtggacggcgtggaagtgcacaacgccaagaccaagcctagagaggaacagtacaacagcacctacagagtggtgtccgtgctgaccgtgctgcaccaggattggctgaacggcaaagagtacaagtgcaaggtgtccaacaaggccctgcctgctcctatcgagaaaaccatcagcaaggccaagggccagcctagggaaccccaggtttacacccttcctccatgccgggatgagctgaccaagaaccaggtgtccctgtggtgtctcgtgaagggcttctaccccagcgacattgccgtggaatgggagagcaatggccagcctgagaacaactacaagacaacccctcctgtgctggacagcgacggctcattcttcctgtacagcaagctgacagtcgacaagtccagatggcagcagggcaacgtgttcagttgcagcgtgctgcacgaggccctgcacagtcactacacccagaagtccctgagcctgtctcctgga

SEQ ID NO: 659 - protein, 723 aa, synthetic construct; identical to SEQ ID NO: 655
  REGION 1..723: note = _

SEQ ID NO: 660 - DNA, 2169 bp, synthetic construct; identical to SEQ ID NO: 364
  misc_feature 1..2169: note = _
  source 1..2169: mol_type = other DNA

SEQ ID NO: 661 - protein, 758 aa, synthetic construct
  REGION 1..758: note = _
QSVLTQPPSVSAAPGQKVTISCSGNTSNIGNNFVSWYQQRPGRAPQLLIYETDKRPSGIPDRFSASKSGTSGTLAITGLQTGDEADYYCATWAASLSSARVFGTGTKVIVLGGGGSESALTQPPSASGSPGQSITISCTGTSNNFVSWYQQHAGKAPKLVIYDVNKRPSGVPDRFSGSKSGNTASLTVSGLQTDDEAVYYCGSLVGNWDVIFGGGTKLTVLGSGGSGGSGSGGGGSASGSGEPQLQESGPTLVEASETLSLTCAVSGDSTAACNSFWGWVRQPPGKGLEWVGSLSHCASYWNRGWTYHNPSLKSRLTLALDTPKNLVFLKLNSVTAADTATYYCARFGGEVLRYTDWPKPAWVDLWGRGTLVTVSSGGGGSQVQLVESGGGVVQPGTSLRLSCAASQFRFDGYGMHWVRQAPGKGLEWVASISHDGIKKYHAEKVWGRFTISRDNSKNTLYLQMNSLRPEDTALYYCAKDLREDECEEWWSDYYDFGKQLPCAKSRGGLVGIADNWGQGTMVTVSSASGGSGDKTHTCPPCPAPELLGGPSVFLFPPKPKDTLMISRTPEVTCVVVDVSHEDPEVKFNWYVDGVEVHNAKTKPREEQYNSTYRVVSVLTVLHQDWLNGKEYKCKVSNKALPAPIEKTISKAKGQPREPQVYTLPPCRDELTKNQVSLWCLVKGFYPSDIAVEWESNGQPENNYKTTPPVLDSDGSFFLYSKLTVDKSRWQQGNVFSCSVLHEALHSHYTQKSLSLSPG

SEQ ID NO: 662 - DNA, 2274 bp, synthetic construct
  misc_feature 1..2274: note = _
  source 1..2274: mol_type = other DNA
cagtctgtgctgacacagcctccatccgtgtctgctgcccctggccagaaagtgaccatcagctgtagcggcaacaccagcaacatcggcaacaacttcgtgtcctggtatcagcagaggcccggcagagcacctcagctgctgatctacgagacagacaagaggcccagcggcatccccgatagattttccgccagcaagagcggcacctctggcacactggctatcacaggactgcagacaggcgacgaggccgattactactgtgctacatgggccgccagcctgtctagcgccagagtttttggcaccggcaccaaagtgatcgtgctgggcggaggcggttctgaaagcgctctgacccagcctccatctgcatctggaagccctggccagagcatcaccatcagctgtaccggcaccagcaacaacttcgtgtcctggtatcaacagcacgccggcaaggcccctaagctggtcatctacgacgtgaacaagaggccctccggcgtgcccgatagattcagcggctctaagtctggcaacaccgccagcctgactgtgtctggcctgcagacagatgatgaggccgtgtattactgcggcagcctcgtcggaaactgggacgtgatatttggaggcggcaccaagctgaccgtgctgggttctggcggaagcggaggatctggatctggtggtggtggatctgcttctggcagtggagaacctcagctccaagaaagcggccccacactggtggaagcctctgaaaccctgtctctgacctgtgccgtgtctggggattctaccgccgcctgcaatagcttctggggctgggttcgacagcctcctggaaagggactcgagtgggtcggaagcctgtctcactgtgccagctactggaacagaggctggacctatcacaaccctagcctgaagtccaggctgaccctggctctggacacccctaagaacctggtgttcctgaaactgaactccgtgacagccgccgacacagccacctactactgcgctagatttggcggcgaggtgctgagatacaccgactggcctaaacctgcctgggttgacctgtggggcagaggcacactggttaccgtgtcctctggaggcggaggtagtcaggttcagctggtggaatctggtggcggagtggtgcagcctggcacatctctgagactgtcttgtgccgcctctcagttcagattcgacggctacggaatgcactgggtccgacaggcacctggcaaaggccttgaatgggtcgccagcatcagccacgacggcatcaagaagtaccacgccgagaaagtgtggggcagattcaccatcagccgggacaacagcaagaacaccctgtacctgcagatgaacagcctgcggcctgaggacacagccctgtactattgcgccaaggacctgcgcgaggacgagtgtgaagaatggtggagcgactactacgacttcggcaagcagctgccctgcgccaaaagtagaggtggccttgtgggaatcgccgacaactggggacagggcacaatggtcacagtgtcctctgcttctggcggctccggagataagacccacacatgtcctccatgtcctgctccagaactgctcggcggcccttctgtgttcctgtttcctccaaagcctaaggacaccctgatgatcagcagaacccctgaagtgacctgcgtggtggtggatgtgtctcacgaggaccccgaagtgaagttcaattggtacgtggacggcgtggaagtgcacaacgccaagaccaagcctagagaggaacagtacaacagcacctacagagtggtgtccgtgctgaccgtgctgcaccaggattggctgaacggcaaagagtacaagtgcaaggtgtccaacaaggccctgcctgctcctatcgagaaaaccatcagcaaggccaagggccagcctagggaaccccaggtttacacccttcctccatgccgggatgagctgaccaagaaccaggtgtccctgtggtgtctcgtgaagggcttctaccccagcgacattgccgtggaatgggagagcaatggccagcctgagaacaactacaagacaacccctcctgtgctggacagcgacggctcattcttcctgtacagcaagctgacagtcgacaagtccagatggcagcagggcaacgtgttcagttgcagcgtgctgcacgaggccctgcacagtcactacacccagaagtccctgagcctgtctcctgga

SEQ ID NO: 663 - protein, 723 aa, synthetic construct; identical to SEQ ID NO: 655
  REGION 1..723: note = _

SEQ ID NO: 664 - DNA, 2169 bp, synthetic construct; identical to SEQ ID NO: 364
  misc_feature 1..2169: note = _
  source 1..2169: mol_type = other DNA

SEQ ID NO: 665-668 - skipped (4 entries)

SEQ ID NO: 669 - protein, 5 aa, synthetic construct
  REGION 1..5: note = _
GGSGG

SEQ ID NO: 670 - protein, 20 aa, synthetic construct
  REGION 1..20: note = _
GSGGSAGSGSGGGGSASGSG

SEQ ID NO: 671 - protein, 5 aa, synthetic construct
  REGION 1..5: note = _
GGGGS

SEQ ID NO: 672 - protein, 20 aa, synthetic construct
  REGION 1..20: note = _
GSGGSGGSGSGGGGSASGSG

SEQ ID NO: 673 - protein, 453 aa, synthetic construct
  REGION 1..453: note = _
QVQLVQSGAEVKKPGSSVKVSCKASGYAFSYSWINWVRQAPGQGLEWMGRIFPGDGDTDYNGKFKGRVTITADKSTSTAYMELSSLRSEDTAVYYCARNVFDGYWLVYWGQGTLVTVSSGGSGGASTKGPSVFPLAPSSKSTSGGTAALGCLVKDYFPEPVTVSWNSGALTSGVHTFPAVLQSSGLYSLSSVVTVPSSSLGTQTYICNVNHKPSNTKVDKKVEPKSCDKTHTCPPCPAPEAAGGPSVFLFPPKPKDTLMISRTPEVTCVVVDVSHEDPEVKFNWYVDGVEVHNAKTKPREEQYNSTYRVVSVLTVLHQDWLNGKEYKCKVSNKALAAPIEKTISKAKGQPREPQVYTLPPCRDELTKNQVSLWCLVKGFYPSDIAVEWESNGQPENNYKTTPPVLDSDGSFFLYSKLTVDKSRWQQGNVFSCSVMHEALHNHYTQKSLSLSPG

SEQ ID NO: 674 - DNA, 1344 bp, synthetic construct
  misc_feature 1..1344: note = _
  source 1..1344: mol_type = other DNA
caggttcagctggttcagtctggcgccgaagtgaagaaacctggcagcagcgtgaaggtgtcctgcaaggcctctggctacgccttcagctacagctggatcaactgggtccgacaggcccctggacaaggcttggaatggatgggcagaatcttccccggcgacggcgacaccgattacaacggcaagttcaagggcagagtgaccatcaccgccgacaagagcacaagcaccgcctacatggaactgagcagcctgagaagcgaggacaccgccgtgtactactgcgccagaaacgtgttcgacggctactggctggtgtattggggccagggaacactggtcacagtgtccagcgcttcgaccaagggcccatccgtgtttcctctggctcccagcagcaagtctacaagcggaggaacagccgctctgggctgcctggtcaaggattactttcccgagcctgtgaccgtgtcctggaattctggcgctctgacaagcggcgtgcacacctttccagctgtgctgcaaagcagcggcctgtactctctgagcagcgtggtcacagtgcctagctctagcctgggcacccagacctacatctgcaatgtgaaccacaagcctagcaacaccaaggtggacaagaaggtggaacccaagagctgcgataagacccacacatgtcctccatgtcctgctccagaagctgctggcggcccttctgtgttcctgtttcctccaaagcctaaggacaccctgatgatcagcagaacccctgaagtgacctgcgtggtggtggatgtgtctcacgaggaccccgaagtgaagttcaattggtacgtggacggcgtggaagtgcacaacgccaagaccaagcctagagaggaacagtacaacagcacctacagagtggtgtccgtgctgaccgtgctgcaccaggattggctgaacggcaaagagtacaagtgcaaggtgtccaacaaggccctggccgctcctatcgagaaaaccatcagcaaggccaagggccagcctagggaaccccaggtttacacccttcctccatgccgggatgagctgaccaagaaccaggtgtccctgtggtgtctcgtgaagggcttctaccccagcgacattgccgtggaatgggagagcaatggccagcctgagaacaactacaagacaacccctcctgtgctggacagcgacggctcattcttcctgtacagcaagctgacagtcgacaagtccagatggcagcagggcaacgtgttcagttgcagcgtgatgcacgaggccctgcacaaccactacacccagaagtccctgagcctgtctcctgga

SEQ ID NO: 675 - protein, 219 aa, synthetic construct
  REGION 1..219: note = _
DIVMTQTPLSLPVTPGEPASISCRSSKSLLHSNGITYLYWYLQKPGQSPQLLIYQMSNLVSGVPDRFSGSGSGTDFTLKISRVEAEDVGVYYCAQNLELPYTFGGGTKVEIKRTVAAPSVFIFPPSDEQLKSGTASVVCLLNNFYPREAKVQWKVDNALQSGNSQESVTEQDSKDSTYSLSSTLTLSKADYEKHKVYACEVTHQGLSSPVTKSFNRGEC

SEQ ID NO: 676 - DNA, 657 bp, synthetic construct
  misc_feature 1..657: note = _
  source 1..657: mol_type = other DNA
gacatcgtgatgacccagacacctctgagcctgcctgtgacacctggcgaacctgccagcatcagctgcagaagcagcaagagcctgctgcacagcaacggcatcacctacctgtactggtatctgcagaaacccggccagtctcctcagctgctgatctaccagatgagcaacctggtgtccggcgtgcccgatagattttctggcagcggctctggcaccgacttcaccctgaagattagcagagtggaagccgaggacgtgggcgtgtactactgtgcccagaacctggaactgccctacacctttggcggaggcaccaaggtggaaatcaagcgtacggtggccgctcccagcgtgttcatcttcccacctagcgacgagcagctgaagtccggcacagcctctgtcgtgtgcctgctgaacaacttctacccccgcgaggccaaagtgcagtggaaggtggacaacgccctgcagagcggcaacagccaggaaagcgtgaccgagcaggacagcaaggactccacctacagcctgagcagcaccctgacactgagcaaggccgactacgagaagcacaaggtgtacgcctgcgaagtgacccaccagggcctgtctagccccgtgaccaagagcttcaaccggggcgagtgt

SEQ ID NO: 677 - protein, 727 aa, synthetic construct; identical to SEQ ID NO: 619
  REGION 1..727: note = _

SEQ ID NO: 678 - DNA, 2181 bp, synthetic construct; identical to SEQ ID NO: 620
  misc_feature 1..2181: note = _
  source 1..2181: mol_type = other DNA

SEQ ID NO: 679 - protein, 453 aa, synthetic construct; identical to SEQ ID NO: 673
  REGION 1..453: note = _

SEQ ID NO: 680 - DNA, 1344 bp, synthetic construct; identical to SEQ ID NO: 674
  misc_feature 1..1344: note = _
  source 1..1344: mol_type = other DNA

SEQ ID NO: 681 - protein, 219 aa, synthetic construct; identical to SEQ ID NO: 675
  REGION 1..219: note = _

SEQ ID NO: 682 - DNA, 657 bp, synthetic construct; identical to SEQ ID NO: 676
  misc_feature 1..657: note = _
  source 1..657: mol_type = other DNA

SEQ ID NO: 683 - protein, 727 aa, synthetic construct; identical to SEQ ID NO: 623
  REGION 1..727: note = _

SEQ ID NO: 684 - DNA, 2181 bp, synthetic construct; identical to SEQ ID NO: 624
  misc_feature 1..2181: note = _
  source 1..2181: mol_type = other DNA

SEQ ID NO: 685 - protein, 453 aa, synthetic construct; identical to SEQ ID NO: 673
  REGION 1..453: note = _

SEQ ID NO: 686 - DNA, 1344 bp, synthetic construct; identical to SEQ ID NO: 674
  misc_feature 1..1344: note = _
  source 1..1344: mol_type = other DNA

SEQ ID NO: 687 - protein, 219 aa, synthetic construct; identical to SEQ ID NO: 675
  REGION 1..219: note = _

SEQ ID NO: 688 - DNA, 657 bp, synthetic construct; identical to SEQ ID NO: 676
  misc_feature 1..657: note = _
  source 1..657: mol_type = other DNA

SEQ ID NO: 689 - protein, 723 aa, synthetic construct; identical to SEQ ID NO: 627
  REGION 1..723: note = _

SEQ ID NO: 690 - DNA, 2169 bp, synthetic construct; identical to SEQ ID NO: 628
  misc_feature 1..2169: note = _
  source 1..2169: mol_type = other DNA

SEQ ID NO: 691 - protein, 453 aa, synthetic construct; identical to SEQ ID NO: 673
  REGION 1..453: note = _

SEQ ID NO: 692 - DNA, 1344 bp, synthetic construct; identical to SEQ ID NO: 674
  misc_feature 1..1344: note = _
  source 1..1344: mol_type = other DNA

SEQ ID NO: 693 - protein, 219 aa, synthetic construct; identical to SEQ ID NO: 675
  REGION 1..219: note = _

SEQ ID NO: 694 - DNA, 657 bp, synthetic construct; identical to SEQ ID NO: 676
  misc_feature 1..657: note = _
  source 1..657: mol_type = other DNA

SEQ ID NO: 695 - protein, 723 aa, synthetic construct; identical to SEQ ID NO: 631
  REGION 1..723: note = _

SEQ ID NO: 696 - DNA, 2169 bp, synthetic construct; identical to SEQ ID NO: 632
  misc_feature 1..2169: note = _
  source 1..2169: mol_type = other DNA

SEQ ID NO: 697 - protein, 577 aa, synthetic construct
  REGION 1..577: note = _
QVQLVQSGAEVKKPGSSVKVSCKASGYAFSSYWMNWVRQAPGQGLEWMGQIWPGDSDTNYAQKFQGRVTITADESTSTAYMELSSLRSEDTAVYYCARRETTTVGRYYYAMDYWGQGTTVTVSSGGSGSQVQLVQSGAEVAKPGASVKVSCKASGYTFTRYTMHWVKQAPGQGLEWIGYINPSRGYTNYAQKFQGKATLTTDKSTSTAYMELSSLRSEDTAVYYCARYYDDHYSLDYWGQGTTLTVSSASTKGPSVFPLAPSSKSTSGGTAALGCLVKDYFPEPVTVSWNSGALTSGVHTFPAVLQSSGLYSLSSVVTVPSSSLGTQTYICNVNHKPSNTKVDKKVEPKSCDKTHTCPPCPAPELLGGPSVFLFPPKPKDTLMISRTPEVTCVVVDVSHEDPEVKFNWYVDGVEVHNAKTKPREEQYNSTYRVVSVLTVLHQDWLNGKEYKCKVSNKALPAPIEKTISKAKGQPREPQVCTLPPSRDELTKNQVSLSCAVKGFYPSDIAVEWESNGQPENNYKTTPPVLDSDGSFFLVSKLTVDKSRWQQGNVFSCSVMHEALHNHYTQKSLSLSPG

1-107. (canceled)

108. An antigen binding polypeptide complex comprising a first polypeptide and a second polypeptide;
wherein the first polypeptide has a structure represented by:
VL1-VL2-VH2-VH1-Fc;
VH1-VH2-VL2-VL1-Fc;
VL1-L1-VL2-L2-VH2-L3-VH1-Fc;
VH1-L1-VH2-L2-VL2-L3-VL1-Fc;
VL1-L1-VL2-L2-VH2-L3-VH1-L4-Fc; or
VH1-L1-VH2-L2-VL2-L3-VL1-L4-Fc;
wherein the second polypeptide has a structure represented by:
VL3-VH3-Fc;
VH3-VL3-Fc;
VL3-L5-VH3-Fc; or
VH3-L5-VL3-Fc; and
wherein:
VL1 is a first immunoglobulin light chain variable region;
VL2 is a second immunoglobulin light chain variable region;
VL3 is a third immunoglobulin light chain variable region;
VH1 is a first immunoglobulin heavy chain variable region;
VH2 is a second immunoglobulin heavy chain variable region;
VH3 is a third immunoglobulin heavy chain variable region;
Fc is a region comprising an immunoglobulin heavy chain constant region 2 (CH2), an immunoglobulin heavy chain constant region 3 (CH3), and optionally, an immunoglobulin hinge; and
L1, L2, L3, L4 and L5 are amino acid linkers.

109. The antigen binding polypeptide complex of claim 108,
wherein the first polypeptide has a structure represented by:
VL1-VL2-VH2-VH1-CH1-Fc;
VH1-VH2-VL2-VL1-CH1-Fc;
VL1-VL2-VH2-VH1-CL-Fc;
VH1-VH2-VL2-VL1-CL-Fc;
VL1-L1-VL2-L2-VH2-L3-VH1-L4-CH1-Fc;
VH1-L1-VH2-L2-VL2-L3-VL1-L4-CH1-Fc;
VL1-L1-VL2-L2-VH2-L3-VH1-L4-CL-Fc; or
VH1-L1-VH2-L2-VL2-L3-VL1-L4-CL-Fc;
wherein the second polypeptide has a structure represented by:
VL3-VH3-CH1-Fc;
VH3-VL3-CH1-Fc;
VL3-VH3-CL-Fc;
VH3-VL3-CL-Fc;
VL3-L5-VH3-L6-CH1-L7-Fc;
VH3-L5-VL3-L6-CH1-L7-Fc;
VL3-L5-VH3-L6-CL-L7-Fc; or
VH3-L5-VL3-L6-CL-L7-Fc; and
wherein:
CH1 is an immunoglobulin heavy chain constant region 1;
CL is an immunoglobulin light chain constant region; and
L1, L2, L3, L4, L5, L6, and L7 are amino acid linkers.

110. The antigen binding polypeptide complex of claim 108,
wherein the second polypeptide has a structure represented by:
VL3-VH3-CH1-CL-Fc;
VH3-VL3-CH1-CL-Fc;
VL3-VH3-CL-CH1-Fc;
VH3-VL3-CL-CH1-Fc;
VL3-L6-VH3-L7-CH1-L8-CL-Fc;
VH3-L6-VL3-L7-CH1-L8-CL-Fc;
VL3-L6-VH3-L7-CL-L8-CH1-Fc;
VH3-L6-VL3-L7-CL-L8-CH1-Fc;
VL3-VH3-L6-CH1-CL-Fc;
VH3-VL3-L6-CH1-CL-Fc;
VL3-VH3-L6-CL-CH1-Fc; or
VH3-VL3-L6-CL-CH1-Fc; and
wherein:
CH1 is an immunoglobulin heavy chain constant region 1;
CL is an immunoglobulin light chain constant region; and
L1, L2, L3, L4, L5, L6, L7 and L8 are amino acid linkers.

111. The antigen binding polypeptide complex of claim 108,
wherein the second polypeptide has a structure represented by:
VL3-CL-VH3-CH1-Fc;
VL3-CH1-VH3-CL-Fc;
VH3-CH1-VL3-CL-Fc;
VH3-CL-VL3-CH1-Fc;
VL3-L6-CL-L7-VH3-L8-CH1-Fc;
VL3-L6-CH1-L7-VH3-L8-CL-Fc;
VH3-L6-CH1-L7-VL3-L8-CL-Fc;
VH3-L6-CL-L7-VL3-L8-CH1-Fc;
VL3-CL-L6-VH3-CH1-Fc;
VL3-CH1-L6-VH3-CL-Fc;
VH3-CH1-L6-VL3-CL-Fc; or
VH3-CL-L6-VL3-CH1-Fc; and
wherein:
CH1 is an immunoglobulin heavy chain constant region 1;
CL is an immunoglobulin light chain constant region; and
L1, L2, L3, L4, L5, L6, L7 and L8 are amino acid linkers.

112. An antigen binding polypeptide complex comprising a first polypeptide, a second polypeptide, and a third polypeptide;
wherein the first polypeptide has a structure represented by:
VL1-VL2-VH2-VH1-Fc;
VH1-VH2-VL2-VL1-Fc;
VL1-L1-VL2-L2-VH2-L3-VH1-Fc;
VH1-L1-VH2-L2-VL2-L3-VL1-Fc;
VL1-L1-VL2-L2-VH2-L3-VH1-L4-Fc; or
VH1-L1-VH2-L2-VL2-L3-VL1-L4-Fc;
wherein the second polypeptide has a structure represented by:
VL3; or
VL3-L5;
wherein the third polypeptide has a structure represented by:
VH3-Fc; or
VH3-L6-Fc; and
wherein:
VL1 is a first immunoglobulin light chain variable region;
VL2 is a second immunoglobulin light chain variable region;
VL3 is a third immunoglobulin light chain variable region;
VH1 is a first immunoglobulin heavy chain variable region;
VH2 is a second immunoglobulin heavy chain variable region;
VH3 is a third immunoglobulin heavy chain variable region;
Fc is a region comprising an immunoglobulin heavy chain constant region 2 (CH2), an immunoglobulin heavy chain constant region 3 (CH3), and optionally, an immunoglobulin hinge; and
L1, L2, L3, L4, L5 and L6 are amino acid linkers.

113. The antigen binding polypeptide complex of claim 112,
wherein the second polypeptide has a structure represented by:
VL3-CH1;
VL3-CL;
VL3-L5-CH1; or
VL3-L5-CL;
wherein the third polypeptide has a structure represented by:
VH3-CH1-Fc;
VH3-CL-Fc;
VH3-L6-Fc;
VH3-L6-CH1-Fc; or
VH3-L6-CL-Fc; and
wherein:
CH1 is an immunoglobulin heavy chain constant region 1; and
CL is an immunoglobulin light chain constant region.

114. An antigen binding polypeptide complex comprising a first polypeptide, a second polypeptide, and a third polypeptide;
wherein the first polypeptide has a structure represented by:
VL1-VL2-VH2-VH1-Fc;
VH1-VH2-VL2-VL1-Fc;
VL1-L1-VL2-L2-VH2-L3-VH1-Fc;
VH1-L1-VH2-L2-VL2-L3-VL1-Fc;
VL1-L1-VL2-L2-VH2-L3-VH1-L4-Fc; or
VH1-L1-VH2-L2-VL2-L3-VL1-L4-Fc;
wherein the second polypeptide has a structure represented by:
VL3-Fc; or
VL3-L5-Fc;
wherein the third polypeptide has a structure represented by:
VH3; or
VH3-L6; and
wherein:
VL1 is a first immunoglobulin light chain variable region;
VL2 is a second immunoglobulin light chain variable region;
VL3 is a third immunoglobulin light chain variable region;
VH1 is a first immunoglobulin heavy chain variable region;
VH2 is a second immunoglobulin heavy chain variable region;
VH3 is a third immunoglobulin heavy chain variable region;
Fc is a region comprising an immunoglobulin heavy chain constant region 2 (CH2), an immunoglobulin heavy chain constant region 3 (CH3), and optionally, an immunoglobulin hinge; and
L1, L2, L3, L4, L5 and L6 are amino acid linkers.

115. The antigen binding polypeptide complex of claim 114,
wherein the second polypeptide has a structure represented by:
VL3-CH1-Fc;
VL3-CL-Fc;
VL3-L5-CH1-Fc; or
VL3-L5-CL-Fc;
wherein the third polypeptide has a structure represented by:
VH3-CH1;
VH3-CL;
VH3-L6-CH1; or
VH3-L6-CL; and
wherein:
CH1 is an immunoglobulin heavy chain constant region 1; and
CL is an immunoglobulin light chain constant region.

116. The antigen binding polypeptide complex of claim 108, wherein VH1, VH2 and VH3 each bind to different antigens, and VL1, VL2 and VL3 each bind to different antigens.

117. The antigen binding polypeptide complex of claim 108, wherein linkers L1, L2, L3, L4 and L5 each comprise an amino acid sequence having at least 95% identity to any one of SEQ ID NOs:1-19 and 665-672.

118. The antigen binding polypeptide complex of claim 112, wherein linkers L1, L2, L3, L4, L5 and L6 each comprise an amino acid sequence having at least 95% identity to any one of SEQ ID NOs:1-19 and 665-672.

119. The antigen binding polypeptide complex of claim 114, wherein linkers L1, L2, L3, L4, L5 and L6 each comprise an amino acid sequence having at least 95% identity to any one of SEQ ID NOs:1-19 and 665-672.

120. The antigen binding polypeptide complex of claim 108, wherein the Fc region comprises at least one knob-into-hole modification.

121. The antigen binding polypeptide complex of claim 112, wherein the Fc region comprises at least one knob-into-hole modification.

122. The antigen binding polypeptide complex of claim 114, wherein the Fc region comprises at least one knob-into-hole modification.

123. An antibody or antigen binding fragment thereof comprising the antigen binding polypeptide complex of claim 108.

124. The antibody or antigen binding fragment thereof of claim 123, wherein the antigen binding fragment is a Fab, scFab, Fab′, F(ab′)₂, Fv, or scFv.

125. A polypeptide having at least 95% identity to any one of SEQ ID NOs:78-92.

126. A polynucleotide having at least 95% identity to any one of SEQ ID NOs:93-107.

127. A pharmaceutical composition comprising the antigen binding polypeptide complex of claim 108, and (ii) a pharmaceutically acceptable carrier.

128. A pharmaceutical composition comprising (i) a polynucleotide encoding the antigen binding polypeptide complex of claim 108, and (ii) a pharmaceutically acceptable carrier.

129. A method of treating or preventing a cancer, comprising administering to a subject in need thereof a therapeutically effective amount of the antigen binding polypeptide complex of claim 108.

130. A method of treating or preventing a virus infection, comprising administering to a subject in need thereof a therapeutically effective amount of the antigen binding polypeptide complex of claim 108.
